(19) United States
(12) Patent Application Publication
(10) Pub. No.: US 2023/0218723 A1
(43) Pub. Date: Jul. 13, 2023

(54) COMPOSITIONS AND METHODS FOR USING SILK-ELASTINLIKE PROTEIN-BASED POLYMERS

(71) Applicant: University of Utah Research Foundation, Salt Lake City, UT (US)

(72) Inventors: Hamidreza Ghandehari, Salt Lake City, UT (US); Joseph Cappello, San Diego, CA (US); Azadeh Poursaid, Salt Lake City, UT (US); Mark Martin Jensen, Pleasant Grove, UT (US)

(21) Appl. No.: 17/640,627

(22) PCT Filed: Sep. 4, 2020
(86) PCT No.: PCT/US2020/049458

§ 371 Date: Mar. 4, 2022

Related U.S. Application Data
(60) Provisional application No. 62/897,033, filed on Sep. 6, 2019.

(51) Int. Cl. A61K 38/39; A61K 9/00; A61K 49/00; A61P 9/14

(52) U.S. Cl. CPC A61K 38/39; A61K 9/0024; A61K 49/0034; A61K 49/0073; A61P 9/14

(57) ABSTRACT

Disclosed are methods of treating an aneurysm in a subject comprising administering to the subject a therapeutically effective amount of a composition comprising a SELP. Disclosed are methods of preventing rupture of an aneurysm comprising administering to a subject having an aneurysm a composition comprising a SELP, wherein the SELP is present in the aneurysm and prevents rupture. Also disclosed are methods of embolizing an aneurysm in a subject comprising administering to the subject a therapeutically effective amount of a composition comprising SEEP. Disclosed are methods of treating AVM in a subject comprising administering to the subject a composition comprising a SELP. In some aspects, the SELP embolizes an abnormal blood vessel in the AVM. Disclosed are methods of embolizing an AVM in a subject comprising administering to the subject a therapeutically effective amount of a composition comprising a SELP, wherein the SELP embolizes an abnormal blood vessel in the AVM.

### CROSS-REFERENCE TO RELATED APPLICATION

[0001] This application claims the benefit of U.S. Provisional Patent Application No. 62/897,033, filed on Sep. 6, 2019, which is incorporated by reference herein in its entirety.

### STATEMENT REGARDING FEDERALLY SPONSORED RESEARCH

[0002] This invention was made with government support under Grant Number 1R41NS100184 awarded by the National Institute of Health and Grant Number 1256065 awarded by the National Science Foundation. The government has certain rights in this invention.

### BACKGROUND

[0003] Cerebral aneurysms (CA), bulges in weakened blood vessels in the brain, are the primary cause of severe hemorrhagic stroke. Current embolic systems for treating CA leave behind metal components permanently in the brain that interfere with medical imaging, require the use of specialized equipment, fail to resolve the aneurysm in up to 40% of patients, and can increase the risk of death in the event of aneurysm rupture. An ideal embolic system for treating CA would be easily deployed with any clinical microcatheter, produce complete occlusion of the aneurysm sac without depending upon thrombosis formation, allow for the formation of a new blood vessel wall over the neck of the aneurysm, and then be absorbed by the body. Disclosed herein is the use of recombinant genetic engineering to combine the environmentally responsive solubility of tropoelastin with the strength of silk fibers to create a bioinspired silk-elastinlike protein polymer (SELP)-based liquid embolic that can be administered via the smallest of microcatheters and occlude CA.

### BRIEF SUMMARY

[0004] Disclosed are methods of treating an aneurysm in a subject comprising administering to the subject a therapeutically effective amount of a composition comprising a SELP.

[0005] Disclosed are methods of preventing rupture of an aneurysm comprising administering to a subject having an aneurysm a composition comprising a SELP, wherein the SELP is present in the aneurysm and prevents rupture.

[0006] Also disclosed are methods of embolizing an aneurysm in a subject comprising administering to the subject a therapeutically effective amount of a composition comprising SELP.

[0007] Disclosed are methods of treating AVM in a subject comprising administering to the subject a composition comprising a SELP. In some aspects, the SELP embolizes an abnormal blood vessel in the AVM.

[0008] Disclosed are methods of embolizing an AVM in a subject comprising administering to the subject a therapeutically effective amount of a composition comprising a SELP, wherein the SELP embolizes an abnormal blood vessel in the AVM.

[0009] Additional advantages of the disclosed method and compositions will be set forth in part in the description which follows, and in part will be understood from the description, or may be learned by practice of the disclosed method and compositions. The advantages of the disclosed method and compositions will be realized and attained by means of the elements and combinations particularly pointed out in the appended claims. It is to be understood that both the foregoing general description and the following detailed description are exemplary and explanatory only and are not restrictive of the invention as claimed.

### BRIEF DESCRIPTION OF THE DRAWINGS

[0010] The accompanying drawings, which are incorporated in and constitute a part of this specification, illustrate several embodiments of the disclosed method and compositions and together with the description, serve to explain the principles of the disclosed method and compositions.

[0011] FIG. 1 shows a linear amino acid sequence (1 letter amino acid code) of SELP 815K. Amino acids representing the silk like and elastin like blocks are underlined and double underlined respectively, while the lysine substitute is in the rectangle. The tail amino acid sequence is in black.

[0012] FIG. 2 shows a temperature response of SELP 815K. The mean storage modulus (bottom two lines) and loss modulus (middle three lines) (n=3) are plotted. Dashed lines represent the 95% confidence interval. The top line indicates the temperature of the system.

[0013] FIGS. 3A and 3B show viscosity traces of SELP 815K. A) Shear rate ramp of SELP 815K at 4° C. show shear thinning behavior. Black arrows indicate three shear rates, 0.01 Hz, 120 Hz, and 3000 Hz, exemplifying the shear forces experienced by SELP in the syringe, aneurysm neck, and microcatheter respectively. B) Viscosity measured as a function of temperature from 1-37° C. at 0.1% shear strain and 6.283 rad/s. Plots show the average of 3 samples.

[0014] FIGS. 4A and 4B show a microcatheter delivery of SELP embolic. A) The force profiles of SELP embolic, Isovue 370, PVA 300, and Tornado coils injected through a 2.4 Fr microcatheter at 0.5 mL/min shows that SELP requires similar injection force as other clinically used materials. Traces show the average of three distinct runs with the same material. B) SELP 815K injection profile with a 40 s pause to simulate interruptions in the interventionalists administration of the material. After 40 s a fresh syringe with cold saline was used to expel the SELP 815K remaining in the catheter. During the 40 s the SELP 815K started transitioning to a gel, and the force required to discharge the material was somewhat higher.

[0015] FIGS. 5A and 5B show an in vitro cytocompatibility of SELP 815K. A) The relative 24 hours viability of L-929 cells when grown in the presence of clinically used commercial materials, controls, and SELP 815K. Triton X (1%) served as the negative control, and no treatment served as the positive control for cell viability. Scale bar represents 50 μm. *** indicates P<0.001 when compared to the no treatment control. †† and ††† indicates P<0.01 and P<0.001 compared to SELP 815K. B) Live/Dead assay of 20 μL SELP 815K disks containing L-929 and HUVEC cells, respectively.

[0016] FIG. 6 shows an in vivo angiography of embolization with SELP embolic. The small black circle in each image is a 6.1 mm diameter calibration sphere. In each panel, the black arrow indicates the location of the aneurysm.

[0017] FIGS. 7A, 7B, 7C and 7D show a histological examination of the aneurysms using Masson's trichrome special stain. A) Cross-section of the aneurysm of the 8^{th} animal treated with SELP 815K liquid embolic. Administration of 4× aneurysm volume leads to the complete filling of the aneurysm. The arrow indicates the aneurysm generated in the right common carotid artery (RCCA). LCCA: left common carotid artery, DPA: distal parent artery. B) Cross-section of control animal not treated with SELP 815K liquid embolic. The arrow indicates the aneurysm generated in the right common carotid artery (RCCA). LCCA: left common carotid artery, DPA: distal parent artery. C) Cross-section of 4^{th} animal treated with SELP 815K liquid embolic at 3× magnification. Administration of 3.7× aneurysm volume leads to the presence of a neck remnant. The arrow points to the new connective tissue formed across the complete aneurysm neck. D) A 10× magnification of the cross-section shown in panel C. New connective tissue is forming across the complete surface of the SELP embolic and even bridging a gap to form a complete barrier between the aneurysm and the circulating vasculature. Scale bars are as indicated in each image.

[0018] FIGS. 8A-8E show a SELP liquid embolic mode of action. A) shows a cerebral aneurysm, the intended treatment target for SELP liquid embolic. B) angiogram still frame of the elastase-induced rabbit animal model pre-procedure. The red box highlights the aneurysm, and the small black circle is a 6.1 mm diameter calibration sphere. C) angiogram still frame of the SELP 815K treated aneurysm. The red box highlights the treated aneurysm, and the small black circle is a 6.1 mm diameter calibration D) shows the insertion of the balloon and microcatheter, the inflation of the balloon, followed by the injection of the SELP liquid embolic. E) shows the physical transformation of the SELP liquid embolic from a solution of protein-polymer strands to a physical gel, followed by the removal of the microcatheter and the balloon.

[0019] FIG. 9 shows an example measurement of aneurysm size. The use of angiograms determined aneurysm size and shape.

[0020] FIG. 10 shows an example of fluoroscopic imaging of interventional devices and radiopaque SELP embolic.

[0021] FIGS. 11A-11D shows viscosity traces of radiopaque embolic formulations. A) Temperature ramp of SELP embolic formulations. B) Shear rate ramp of SELP embolic formulations at 4° C. C) Comparison of SELP formulations at 4° C., 23° C., and 37° C. to represent temperatures the embolic will encounter during its anticipated use. D) Comparison of SELP embolic formulations at shear rates it will encounter during embolization. *, **, *** indicate P<0.001, P<0.05, and P<0.01.

[0022] FIGS. 12A-12D show a microcatheter delivery of SELP embolic. A) Injection profile of SELP embolic and clinical materials injected through a 2.4F microcatheter at 0.5 ml/min. shows that SELP is injectable. B) The mean equilibrium injection force±st. dev. of 3 injections through the system. C) SELP injection profile with a pause to connect a syringe with cold saline to push the SELP remaining in the catheter system through the syringe. D) Photograph showing SELP embolic exiting the microcatheter as a liquid.

[0023] FIGS. 13A-13D show an example of gelling behavior of SELP. A) Oscilitory time sweep at 37° C. illustrating gelation profiles. B) Oscillatory amplitude sweep at 37° C. of gels occurred for 3 hrs. C) Comparison of gel storage moduli 5 min. and 3 hrs. at 37° C. D) Tilt test visually demonstrating gelation of the materials.

[0024] FIGS. 14A, 14B, and 14C show an in vitro biocompatibility of SELP embolic. The relative viability of L-929 of clinical embolics prepared per manufacture's directions after 24 hrs. culture compared to: A) clinically used embolic materials, and B) radiopaque formulations of SELP embolic (n=6). C) Representative images of L-929 and HUVEC cells embedded within SELP embolic while it was still liquid and then allowed to gel. Scale bar represents 50 μm. *** indicates P<0.001 when compared to the no treatment control. †† and ††† indicate P<0.01 and P<0.001 compared to SELP embolic and SELP embolic with contrast. ‡‡‡ indicates P<0.001 for comparisons between SELP with contrast and the contrast alone at equivalent concentrations.

[0025] FIG. 15 is a table showing a summary of sterility test findings.

[0026] FIG. 16 shows an embolization of a model aneurysm in vitro.

[0027] FIG. 17 shows a gross anatomical and histological examination of the aneurysms using Masson's trichrome stain. Scale bars are as indicated in each image. The arrow indicates the aneurysm generated in the right common carotid artery (RCCA). LCCA: left common carotid artery, DPA: distal parent artery.

[0028] FIG. 18 shows an example of muscle and brain with and without SELP embolization.

[0029] FIG. 19 shows an example of structures of indocyanine green and SELP 815K. A) Illustration of silk-elastinlike protein polymer (SELP) 815K structure. The single letter amino acid code for the protein polymer is listed below the graphic. MW: Molecular Weight. B) Chemical Structure of indocyanine green (ICG).

[0030] FIGS. 20A-20C show an effect of ICG on SELP hydrogel properties. A) soluble fractions and B) swelling ratios of SELP 815K hydrogels loaded with ICG. The data represent the mean±st. dev. of n=6 samples. C) SEM images demonstrating lyophilized SELP microstructures with varying ICG concentrations. The scale bars represent 200 μm and 50 μm for the 200× and 1000×, respectively. *: p<0.05, **: p<0.01, ***: p<0.001

[0031] FIG. 21 shows an effect of concentration on ICG release from SELP hydrogels. The data represent mean±st. dev. of n=6 samples. ***: p<0.001

[0032] FIGS. 22A-22E SELP-ICG viscoelastic properties. A) Viscosity traces of two embolic formulations from 18-37° C., illustrating that temperature increases SELP viscosity and the addition of ICG enhances this effect. B) SELP and SELP-ICG viscosity at 25° C. C) The storage (G′) and loss (G″) moduli of SELP and SELP-ICG over a 3-hr. period demonstrate rapid gelation kinetics and the formation of a robust gel. The dashed lines indicate the 95% confidence interval. D) Storage moduli at 5 min. and 3 hrs. show that ICG incorporation increased the strength of the gel. E) Tilt test of SELP 815K 12 wt/wt % with 0.5 mg/mL of ICG at various times at 37° C. ***p<0.001, The data represent the mean±st. dev. (n=3).

[0033] FIGS. 23A and 23B show an example of ICG release and diffusion in agar phantom tissues. A) ICG fluorescence in tissue phantoms shows release and diffusion after simulated embolization. B) BSA enhanced the release of ICG and facilitated diffusion within the tissue phantom and improved fluorescent signal. Partitioning from SELP into the phantom. Data points represent the mean±st. dev. of 6 samples. Comparisons were made between two groups using a 2-tail students T-test of the points at 48 hrs. *p<0.05 and ***p<0.001 between the indicated groups.

[0034] FIGS. 24A-24C show visualization of ICG fluorescence. A) ICG is readily visible with a commercially available endoscope, shown as blue overlay, and using IVIS preclinical imaging system, shown in a yellow-hot overlay. However, ICG fluorescence dose not directly correlate with concentration. B) Image analysis demonstrates that there is visually apparent self-quenching that occurs at concentrations higher than 0.012 mg/mL ICG. C) Signal from IVIS and the endoscope are directly proportional.

[0035] FIGS. 25A and 25B show SELP-ICG embolization and visualization in a microfluidic model tumor. A) Graphical illustration of embolization test setup with images of microfluidic models before and after embolization. After embolization, there was no perfusion to the embolized chip. Below the illustration is a magnified version of one of the collateral flow chips filled with methylene blue to show channel structure. B) IVIS images of the tumor microfluidic chip (top) and a collateral flow chip (bottom) show fluorescence within the SELP-ICG embolized tumor chip but not in the collateral chips.

[0036] FIG. 26 shows computational modeling of shear-force of simulated blood flowing through microfluidic tumor models. Color gradient represents the shear force experienced by the fluid for: A) 1st Generation, D) 2nd Generation, and C) 3rd Generation designs. Images and models were generated using Comsol Multiphysics 5.4. The designs were developed to reduce turbulent flow and reduce dead space within the structures.

[0037] FIGS. 27A and 27B show pressure vs. flow rate through 3 microfluidic tumor models plumbed in parallel. A) Pressure profiles with a flow rate ramp using PBS for the 3rd generation design of microfluidic tumor model. B) Flow rate vs. pressure showed the anticipated linear relationship. The dashed line indicates the regression line of the flow profile. Each point represents the average of 10 sec. of data taken from the equilibrium pressure of the system at each flow rate.

[0038] FIGS. 28A and 28B Cytotoxicity of ICG and SELP-ICG. A) L929 fibroblast and B) HUVEC viability curves in response to increasing ICG concentration of ICG alone or SELP-ICG. The data represent the mean±st. dev. of 6 samples. The solid lines represent the curve derived from fitting the data to a variable slope Hill equation.

### DETAILED DESCRIPTION

[0039] The disclosed method and compositions may be understood more readily by reference to the following detailed description of particular embodiments and the Example included therein and to the Figures and their previous and following description.

[0040] It is to be understood that the disclosed method and compositions are not limited to specific synthetic methods, specific analytical techniques, or to particular reagents unless otherwise specified, and, as such, may vary. It is also to be understood that the terminology used herein is for the purpose of describing particular embodiments only and is not intended to be limiting.

[0041] Disclosed are materials, compositions, and components that can be used for, can be used in conjunction with, can be used in preparation for, or are products of the disclosed method and compositions. These and other materials are disclosed herein, and it is understood that when combinations, subsets, interactions, groups, etc. of these materials are disclosed that while specific reference of each various individual and collective combinations and permutation of these compounds may not be explicitly disclosed, each is specifically contemplated and described herein. Thus, if a class of molecules A, B, and C are disclosed as well as a class of molecules D, E, and F and an example of a combination molecule, A-D is disclosed, then even if each is not individually recited, each is individually and collectively contemplated. Thus, is this example, each of the combinations A-E, A-F, B-D, B-E, B-F, C-D, C-E, and C-F are specifically contemplated and should be considered disclosed from disclosure of A, B, and C; D, E, and F; and the example combination A-D. Likewise, any subset or combination of these is also specifically contemplated and disclosed. Thus, for example, the sub-group of A-E, B-F, and C-E are specifically contemplated and should be considered disclosed from disclosure of A, B, and C; D, E, and F; and the example combination A-D. This concept applies to all aspects of this application including, but not limited to, steps in methods of making and using the disclosed compositions. Thus, if there are a variety of additional steps that can be performed it is understood that each of these additional steps can be performed with any specific embodiment or combination of embodiments of the disclosed methods, and that each such combination is specifically contemplated and should be considered disclosed.

### A. Definitions

[0042] It is understood that the disclosed method and compositions are not limited to the particular methodology, protocols, and reagents described as these may vary. It is also to be understood that the terminology used herein is for the purpose of describing particular embodiments only, and is not intended to limit the scope of the present invention which will be limited only by the appended claims.

[0043] It must be noted that as used herein and in the appended claims, the singular forms “a”, “an”, and “the” include plural reference unless the context clearly dictates otherwise. Thus, for example, reference to “a SELP” includes a plurality of such SELPs, reference to “the SELP” is a reference to one or more SELPs and equivalents thereof known to those skilled in the art, and so forth.

[0044] As used herein, the term “subject” refers to the target of administration, e.g., a human. Thus the subject of the disclosed methods can be a vertebrate, such as a mammal, a fish, a bird, a reptile, or an amphibian. The term “subject” also includes domesticated animals (e.g., cats, dogs, etc.), livestock (e.g., cattle, horses, pigs, sheep, goats, etc.), and laboratory animals (e.g., mouse, rabbit, rat, guinea pig, fruit fly, etc.). In one aspect, a subject is a mammal. In another aspect, a subject is a human. The term does not denote a particular age or sex. Thus, adult, child, adolescent and newborn subjects, as well as fetuses, whether male or female, are intended to be covered.

[0045] A “hydrogel” as used herein refers to a semisolid composition constituting a substantial amount of water. A hydrogel can be formed from a network of polymer chains in which polymers or mixtures thereof are dissolved or dispersed. Hydrogels are composed of three dimensional polymer networks that will swell without dissolving when placed in water or other biological fluids. A hydrogel is significantly more viscous than water or other similar liquids. Hence, for purposes herein, a hydrogel is generally a non-liquid form.

[0046] By “treat” is meant to administer a composition or SELP of the invention to a subject, such as a human or other mammal (for example, an animal model), that has a CA, in order to prevent or delay a worsening of the effects of the CA, or to partially or fully reverse the effects of the CA.

[0047] The term “prevent” as used herein is defined as eliminating or reducing the likelihood of the occurrence of one or more symptoms of a disease or disorder (e.g., CA) when compared to the same symptom in the absence of the compound.

[0048] By an “effective amount” of a composition or SELP as provided herein is meant a sufficient amount of the composition or SELP to provide the desired effect. The exact amount required will vary from subject to subject, depending on the species, age, and general condition of the subject, the severity of disease (e.g., CA) that is being treated, the particular composition used, its mode of administration, and the like. Thus, it is not possible to specify an exact “effective amount.” However, an appropriate “effective amount” may be determined by one of ordinary skill in the art using only routine experimentation. In some aspects, effective amount depends upon the rate of injection and how long the polymer is allowed to rest prior to administration. Altering, the timing of the administration can be used to control the depth of penetration of the SELP embolic. The term “therapeutically effective amount” means an amount of a therapeutic, prophylactic, and/or diagnostic agent that is sufficient, when administered to a subject suffering from or susceptible to a disease, disorder, and/or condition (e.g. CA), to treat, alleviate, ameliorate, relieve, alleviate symptoms of, prevent, delay onset of, inhibit progression of, reduce severity of, and/or reduce incidence of the CA.

[0049] As used herein, the terms “administering” and “administration” refer to any method of providing a disclosed SELP, composition, or a pharmaceutical composition to a subject. Such methods are well known to those skilled in the art and include, but are not limited to: oral administration, transdermal administration, administration by inhalation, nasal administration, topical administration, intravaginal administration, ophthalmic administration, intraaural administration, intracerebral administration, rectal administration, sublingual administration, buccal administration, and parenteral administration, including injectable such as intravenous administration, intra-arterial administration, intramuscular administration, interstitial administration, and subcutaneous administration. Administration can be continuous or intermittent. Administration can be through a syringe, catheter, microcatheter, nose, needle, or other geometry. Surgery coupled with local injection into a nidus or sac of a vascular abnormality could be used to introduce the embolic into the luminal space. In various aspects, a preparation can be administered therapeutically; that is, administered to treat an existing disease or condition. In further various aspects, a preparation can be administered prophylactically; that is, administered for prevention of a disease or condition. In an aspect, the skilled person can determine an efficacious dose, an efficacious schedule, or an efficacious route of administration for a disclosed composition or a disclosed SELP so as to treat a subject or cause embolization. In an aspect, the skilled person can also alter or modify an aspect of an administering step so as to improve efficacy of a disclosed SELP, composition, or a pharmaceutical composition.

[0050] “Optional” or “optionally” means that the subsequently described event, circumstance, or material may or may not occur or be present, and that the description includes instances where the event, circumstance, or material occurs or is present and instances where it does not occur or is not present.

[0051] Ranges may be expressed herein as from “about” one particular value, and/or to “about” another particular value. When such a range is expressed, also specifically contemplated and considered disclosed is the range from the one particular value and/or to the other particular value unless the context specifically indicates otherwise. Similarly, when values are expressed as approximations, by use of the antecedent “about,” it will be understood that the particular value forms another, specifically contemplated embodiment that should be considered disclosed unless the context specifically indicates otherwise. It will be further understood that the endpoints of each of the ranges are significant both in relation to the other endpoint, and independently of the other endpoint unless the context specifically indicates otherwise. Finally, it should be understood that all of the individual values and sub-ranges of values contained within an explicitly disclosed range are also specifically contemplated and should be considered disclosed unless the context specifically indicates otherwise. The foregoing applies regardless of whether in particular cases some or all of these embodiments are explicitly disclosed.

[0052] “Embolic” or embolics” as used herein refers to a composition composition capable of causing or inducing an embolism. For example, an embolic can be a coil, gelfoam, particle, or liquid sclerosants. Additional embolics include those described in Golzarian et al. “An Overview of Embolics”, Endovascular Today, April (2009) 37-41, which is hereby incorporated by reference in its entirety for teaching embolics. In some aspects, the embolic is a SELP embolic. In some aspects, the embolic is Butyl cyanoacrylate (NBCA), ethiodol, ethanol, ethanolamine oleate, sotradecol, polyvinyl alcohol (PVA), Embolization microspheres, or a tissue adhesive.

[0053] Unless defined otherwise, all technical and scientific terms used herein have the same meanings as commonly understood by one of skill in the art to which the disclosed method and compositions belong. Although any methods and materials similar or equivalent to those described herein can be used in the practice or testing of the present method and compositions, the particularly useful methods, devices, and materials are as described. Publications cited herein and the material for which they are cited are hereby specifically incorporated by reference. Nothing herein is to be construed as an admission that the present invention is not entitled to antedate such disclosure by virtue of prior invention. No admission is made that any reference constitutes prior art. The discussion of references states what their authors assert, and applicants reserve the right to challenge the accuracy and pertinency of the cited documents. It will be clearly understood that, although a number of publications are referred to herein, such reference does not constitute an admission that any of these documents forms part of the common general knowledge in the art.

[0054] Throughout the description and claims of this specification, the word “comprise” and variations of the word, such as “comprising” and “comprises,” means “including but not limited to,” and is not intended to exclude, for example, other additives, components, integers or steps. In particular, in methods stated as comprising one or more steps or operations it is specifically contemplated that each step comprises what is listed (unless that step includes a limiting term such as “consisting of”), meaning that each step is not intended to exclude, for example, other additives, components, integers or steps that are not listed in the step.

### B. Silk-Elastinlike Polymers (SELPs)

[0055] The compositions described herein include a silk-elastinlike protein (SELP). SELPs are a class of genetically engineered protein polymers composed of repeating “blocks” of amino acids, referred to as “silk blocks” (Gly-Ala-Gly-Ala-Gly-Ser) and “elastin blocks” (Gly-Val-Gly-Val-Pro). By varying the number of silk and elastin blocks, the rheological properties of the composition can be modified to fit specific applications. For example, the silk-to-elastin ratio and the length of the silk and elastin block domains as well as the SELP concentration can be modified to optimize gelling upon administration of the composition to a subject. Any of the disclosed SELPs can be used in the methods disclosed herein.

[0056] Examples of SELPs useful herein include, but are not limited to,

[(VPGVG)8(GAGAGS)2]18;
[(GVGVP)4(GAGAGS)9]13;
[(VPGVG)8(GAGAGS)4]12;
[(VPGVG)8(GAGAGS)6]12;
[(VPGVG)8(GAGAGS)8]11;
[(VPGVG)12(GAGAGS)8]8;
[(VPGVG)16(GAGAGS)8]7;
[(VPGVG)32(GAGAGS)8]5;
[(GAGAGS)12GAAVTGRGDSPASAAGY(GAGAGS)5(GVGVGP)8]6;
[(GAGAGS)2(GVGVP)4GKGVP(GVGVP)3]6;
[(GAGAGS)2(GVGVP)4GKGVP(GVGVP)3]12;
[(GAGAGS)2(GVGVP)4GKGVP(GVGVP)3]18;
[(GAGAGS)2(GVGVP)4GKGVP(GVGVP)3]17(GAGAGS)2;
[(GAGAGS)2(GVGVP)4GKGVP(GVGVP)3(GAGAGS)2]13;
[GAGAGS(GVGVP)4GKGVP(GVGVP)3(GAGAGS)2]12;
[(GVGVP)4GKGVP(GVGVP)11(GAGAGS)4]5(GVGVP)4GKGVP(GVGVP)11(GAGAGS)2;
[(GVGVP)4GKGVP(GVGVP)11(GAGAGS)4]7(GVGVP)4GKGVP(GVGVP)11(GAGAGS)2;
[(GVGVP)4GKGVP(GVGVP)11(GAGAGS)4]9(GVGVP)4GKGVP(GVGVP)11(GAGAGS)2;
[GAGS(GAGAGS)2(GVGVP)4GKGVP(GVGVP)11(GAGAGS)5GA]6;
[(GAGAGS)2GVGVPLGPLGP(GVGVP)3GKGVP(GVGVP)3]15(GAGAGS)2;
[(GAGAGS)2GVGVPGFFVRARR(GVGVP)3GKGVP(GVGVP)3]15(GAGAGS)2.

[0057] In some aspects, the SELP can be

MDPVVLQRRDWENPGVTQLNRLAAHPPFASDPM[GAGS
(GAGAGS)₂(GVGVP)₄GKGVP(GVGVP)₁₁(GAGAGS)₅GA]₆
GAMDPGRYQDLRSHHHHHH(SELP-815K)
or
MDPVVLQQRDWENPGVTQLVRLAAHPPFASDPMGAGSGAGAGS
[(GVGVP)₄GKGVP(GVGVP)₃(GAGAGS)₄]₁₂(GVGVP)₄GKGVP
(GVGVP)₂(GAGAGS)₂GAMDPGRYQDLRSHHHHHH(SELP-47K)

The underlined sequences are tail sequences or cloning scars. The tail sequences, or cloning scars, can aid in expression, solubilization, stabilization, and/or purification.

[0058] In some aspects, the SELP can be [GAGS(GAGAGS)ₙ₁(GVGVP)ₙ₂GXGVP(GVGVP)ₙ₃(GAGAGS)ₙ₄GA]ₙ₅GA, wherein X can be any amino acid, and wherein n1, n2, n3, n4, and n5 can each be any number ranging from 1-100.

[0059] In some aspects, X can be any hydrophilic amino acid, such as, but not limited to glutamine, asparagine, histidine, serine, threonine, tyrosine, and cysteine. In some aspects, X can be any cationic amino acid, such as, but not limited to, lysine, arginine, histidine. In some aspects, X can be any amino acid eligible for bioconjugation. For example, an amino acid eligible for bioconjugation can be, but is not limited to, lysine, cystine, tyrosine, glutamatic acid, aspartic acid, tryptophan, arginine, and histidine.

[0060] In some aspects, n1 can be any number ranging from 2-10, n2 can be any number ranging from 1-50, n3 can be any number ranging from 1-50, n4 can be any number ranging from 2-10, and n5 can be any number ranging from 1-14. In some aspects, n2+n3+1 must be greater than 7 but less than 100. In some aspects, n1+n4 must be greater than 2 but less than 20. Thus, for example, the disclosed SELPs comprise at least 7 elastin blocks and at least 2 silk blocks. In some aspects, the SELP comprises more elastin blocks than silk blocks.

[0061] In some aspects, the SELP comprises the sequence of

[GAGS(GAGAGS)₂(GVGVP)₄GKGVP(GVGVP)₁₁(GAGAGS)₅GA]₆GA.

[0062] In another aspect, the silk-elastinlike polymer can be a variant of a SELP. A “variant” with reference to a silk-like unit or elastin-like unit refers to a silk-like unit or elastin-like unit that has an amino acid sequence that is altered by one or more amino acids. Typically, a unit sequence is altered by 1, 2, or 3 amino acids. The variant can have an amino acid replacement(s), deletion(s), or insertion(s). For example, the variant can have “conservative” changes, wherein a substituted amino acid has similar structural or chemical properties (e.g., replacement of valine with isoleucine). In some cases, a variant can have “nonconservative” changes (e.g. replacement of a glycine with a tryptophan). Similar minor variations can also include amino acid deletions or insertions, or both. In addition to the teachings herein, guidance in determining which amino acid residues can be substituted, inserted, or deleted without abolishing bioactivity can be found using computer programs well known in the art such as, for example, DNASTAR software.

[0063] In one aspect, the SELP is sheared. In one aspect, a solution of the SELP is introduced into a homogenizer through a needle valve at a pressure of from 1,500 psi to 17,000 psi. Exemplary methods for producing sheared SELPs are provided in Price et al, “Effect of shear on physicochemical properties of matrix metalloproteinase responsive silk-elastinlike hydrogels,” J. Control. Release, 2014, 195:92-98. Not wishing to be bound by theory, the shearing of the SELP solution breaks intramolecular hydrogen bonds between the silk-like motifs. Shearing linearizes the protein, which causes reduction in solution viscosity and increases the opportunity for the formation of intermolecular interactions between the silk-like domains of distinct SELP polymers. Shearing can ultimately increase the peak modulus and gelation rate of the SELP. Increased intermolecular bonding enables the formation of a stiffer and more homogeneous network.

### C. Compositions

[0064] Disclosed are compositions comprising one or more of the disclosed SELPs.

[0065] 1. Pharmaceutical Compositions

[0066] In some aspects, the disclosed compositions can be pharmaceutical compositions. For example, in some aspects, disclosed are pharmaceutical compositions comprising a composition comprising a SELP and a pharmaceutically acceptable carrier. By “pharmaceutically acceptable” is meant a material or carrier that would be selected to minimize any degradation of the active ingredient and to minimize any adverse side effects in the subject, as would be well known to one of skill in the art. Examples of carriers include dimyristoylphosphatidyl (DMPC), phosphate buffered saline or a multivesicular liposome. For example, PG:PC:Cholesterol:peptide or PC:peptide can be used as carriers in this invention. Other suitable pharmaceutically acceptable carriers and their formulations are described in Remington: The Science and Practice of Pharmacy (19th ed.) ed. A. R. Gennaro, Mack Publishing Company, Easton, Pa. 1995. Typically, an appropriate amount of pharmaceutically-acceptable salt is used in the formulation to render the formulation isotonic. Other examples of the pharmaceutically-acceptable carrier include, but are not limited to, saline, Ringer's solution and dextrose solution. The pH of the solution can be from about 5 to about 8, or from about 7 to about 7.5. Further carriers include sustained release preparations such as semi-permeable matrices of solid hydrophobic polymers containing the composition, which matrices are in the form of shaped articles, e.g., films, stents (which are implanted in vessels during an angioplasty procedure), liposomes or microparticles. It will be apparent to those persons skilled in the art that certain carriers may be more preferable depending upon, for instance, the route of administration and concentration of composition being administered. These most typically would be standard carriers for administration of drugs to humans, including solutions such as sterile water, saline, and buffered solutions at physiological pH.

[0067] Pharmaceutical compositions can also include carriers, thickeners, diluents, buffers, preservatives and the like, as long as the intended activity of the polypeptide, peptide, or conjugate of the invention is not compromised. Pharmaceutical compositions may also include one or more active ingredients (in addition to the composition of the invention) such as antimicrobial agents, anti-inflammatory agents, anesthetics, and the like.

[0068] The pharmaceutical compositions as disclosed herein can be prepared for oral or parenteral administration. Pharmaceutical compositions prepared for parenteral administration include those prepared for intravenous (or intra-arterial), intramuscular, subcutaneous, intraperitoneal, transmucosal (e.g., intranasal, intravaginal, or rectal), or transdermal (e.g., topical) administration. Aerosol inhalation can also be used to deliver the fusion proteins. Thus, compositions can be prepared for parenteral administration that includes fusion proteins dissolved or suspended in an acceptable carrier, including but not limited to an aqueous carrier, such as water, buffered water, saline, buffered saline (e.g., PBS), and the like. One or more of the excipients included can help approximate physiological conditions, such as pH adjusting and buffering agents, tonicity adjusting agents, wetting agents, detergents, and the like. Where the compositions include a solid component (as they may for oral administration), one or more of the excipients can act as a binder or filler (e.g., for the formulation of a tablet, a capsule, and the like). Where the compositions are formulated for application to the skin or to a mucosal surface, one or more of the excipients can be a solvent or emulsifier for the formulation of a cream, an ointment, and the like.

[0069] Preparations of parenteral administration include sterile aqueous or non-aqueous solutions, suspensions, and emulsions. Examples of non-aqueous solvents are propylene glycol, polyethylene glycol, vegetable oils such as olive oil, and injectable organic esters such as ethyl oleate. Aqueous carriers include water, alcoholic/aqueous solutions, emulsions or suspensions, including saline and buffered media. Parenteral vehicles include sodium chloride solution, Ringer's dextrose, dextrose and sodium chloride, lactated Ringer's, or fixed oils. Intravenous vehicles include fluid and nutrient replenishers, electrolyte replenishers (such as those based on Ringer's dextrose), and the like. Preservatives and other additives may also be present such as, for example, antimicrobials, anti-oxidants, chelating agents, and inert gases and the like.

[0070] Formulations for optical administration may include ointments, lotions, creams, gels, drops, suppositories, sprays, liquids and powders. Conventional pharmaceutical carriers, aqueous, powder or oily bases, thickeners and the like may be necessary or desirable.

[0071] Compositions for oral administration include powders or granules, suspensions or solutions in water or non-aqueous media, capsules, sachets, or tablets. Thickeners, flavorings, diluents, emulsifiers, dispersing aids, or binders may be desirable. Some of the compositions may potentially be administered as a pharmaceutically acceptable acid- or base-addition salt, formed by reaction with inorganic acids such as hydrochloric acid, hydrobromic acid, perchloric acid, nitric acid, thiocyanic acid, sulfuric acid, and phosphoric acid, and organic acids such as formic acid, acetic acid, propionic acid, glycolic acid, lactic acid, pyruvic acid, oxalic acid, malonic acid, succinic acid, maleic acid, and fumaric acid, or by reaction with an inorganic base such as sodium hydroxide, ammonium hydroxide, potassium hydroxide, and organic bases such as mon-, di-, trialkyl and aryl amines and substituted ethanolamines.

[0072] The pharmaceutical compositions can be sterile and sterilized by conventional sterilization techniques or sterile filtered. Aqueous solutions can be packaged for use as is, or lyophilized, the lyophilized preparation, which is encompassed by the present disclosure, can be combined with a sterile aqueous carrier prior to administration. The pH of the pharmaceutical compositions typically will be between 3 and 11 (e.g., between about 5 and 9) or between 6 and 8 (e.g., between about 7 and 8). The resulting compositions in solid form can be packaged in multiple single dose units, each containing a fixed amount of the above-mentioned agent or agents, such as in a sealed package of tablets or capsules. The composition in solid form can also be packaged in a container for a flexible quantity, such as in a squeezable tube designed for a topically applicable cream or ointment.

[0073] The pharmaceutical compositions described above can be formulated to include a therapeutically effective amount of a composition disclosed herein. In some aspects, therapeutic administration encompasses prophylactic applications. Based on genetic testing and other prognostic methods, a physician in consultation with their patient can choose a prophylactic administration where the patient has a clinically determined predisposition or increased susceptibility (in some cases, a greatly increased susceptibility) to one or more autoimmune diseases or where the patient has a clinically determined predisposition or increased susceptibility (in some cases, a greatly increased susceptibility) to cancer.

[0074] The pharmaceutical compositions described herein can be administered to the subject (e.g., a human subject or human patient) in an amount sufficient to delay, reduce, or preferably prevent the onset of clinical disease. Accordingly, in some aspects, the subject is a human subject. In therapeutic applications, compositions are administered to a subject (e.g., a human subject) already with or diagnosed with an autoimmune disease in an amount sufficient to at least partially improve a sign or symptom or to inhibit the progression of (and preferably arrest) the symptoms of the condition, its complications, and consequences. An amount adequate to accomplish this is defined as a “therapeutically effective amount.” A therapeutically effective amount of a pharmaceutical composition can be an amount that achieves a cure, but that outcome is only one among several that can be achieved. As noted, a therapeutically effective amount includes amounts that provide a treatment in which the onset or progression of the cancer is delayed, hindered, or prevented, or the autoimmune disease or a symptom of the autoimmune disease is ameliorated. One or more of the symptoms can be less severe. Recovery can be accelerated in an individual who has been treated.

[0075] The total effective amount of the conjugates in the pharmaceutical compositions disclosed herein can be administered to a mammal as a single dose, either as a bolus or by infusion over a relatively short period of time, or can be administered using a fractionated treatment protocol in which multiple doses are administered over a more prolonged period of time (e.g., a dose every 4-6, 8-12, 14-16, or 18-24 hours, or every 2-4 days, 1-2 weeks, or once a month). Alternatively, continuous intravenous infusions sufficient to maintain therapeutically effective concentrations in the blood are also within the scope of the present disclosure.

[0076] The pharmaceutical composition may be administered in a number of ways depending on whether local or systemic treatment is desired, and on the area to be treated.

### D. Methods

[0077] 1. Aneurysms

[0078] Disclosed are methods of treating aneurysms. Aneurysms can comprise saccular, fusiform, dissected, and false aneurysms. Saccular aneurysms can occur in several places, including but not limited to, the brain, neck, leg, and kidney. Saccular, dissected and false aneurysms can be treated in a similar manner. Each of these aneurysms comprise a void on one side of an artery that can be filled by SELP using a balloon occlusion of the aneurysm neck prior to filling the void with the SELP. Fusiform aneurysms comprise a void on both sides of an artery wherein treatment with stents are used. SELPs can be used in fusiform aneurysms to help fill voids left behind after placement of a stent.

[0079] Disclosed are methods of treating an aneurysm in a subject comprising administering to the subject a therapeutically effective amount of a composition comprising a SELP.

[0080] Disclosed are methods of preventing rupture of an aneurysm comprising administering to a subject having an aneurysm a composition comprising a SELP, wherein the SELP is present in the aneurysm and prevents rupture.

[0081] Also disclosed are methods of embolizing an aneurysm in a subject comprising administering to the subject a therapeutically effective amount of a composition comprising SELP.

[0082] Any of the disclosed SELPs or compositions comprising a SELP can be used in the disclosed methods. In some aspects, the SELP can be [GAGS(GAGAGS)ₙ₁(GVGVP)ₙ₂GXGVP(GVGVP)ₙ₃(GAGAGS)ₙ₄GA]ₙ₅GA, wherein X can be any amino acid, wherein n1 can be any number ranging from 2-10, n2 can be any number ranging from 1-50, n3 can be any number ranging from 1-50, n4 can be any number ranging from 2-10, and n5 can be any number ranging from 1-14. In some aspects, the SELP comprises the sequence of [GAGS(GAGAGS)₂(GVGVP)₄GKGVP(GVGVP)₁₁(GAGAGS)₅GA]₆GA. In some aspects, the composition can further comprise a pharmaceutically acceptable carrier. Thus, the disclosed methods can use a pharmaceutical composition comprising any of the disclosed compositions or SELPs.

[0083] In some aspects, the aneurysm can be a saccular aneurysm. In some aspects, the saccular aneurysm can be a cerebral aneurysm (CA).

[0084] In some aspects, the subject has been diagnosed with an aneurysm.

[0085] In some aspects, the SELP embolizes the aneurysm.

[0086] In some aspects, the SELP transitions from a liquid to a hydrogel at temperatures above 23° C. For example, the transition from room temperature (23° C.) to body temperature (37° C.) results in a shift from a liquid state to a solid gel.

[0087] In some aspects, a therapeutically effective amount is at least 1× the aneurysm volume. In some aspects, the therapeutically effective amount is at least 2× the aneurysm volume. In some aspects, the therapeutically effective amount is at least 3× the aneurysm volume. In some aspects, the therapeutically effective amount is at least 4× the aneurysm volume.

[0088] In some aspects, the composition is administered using a catheter. A catheter can be used in combination with balloon occlusion. In some aspects, aneurysms can comprise an aneurysm neck and an aneurysmal sac. In some aspects, balloon occlusion can be used to block the aneurysm neck so that the catheter can direct the SELP into the aneurysmal sac wherein the SELP can fill the void within the sac. In some aspects, fill the void within the sac can mean completely fill the void or partially fill the void. Thus, in some aspects, the composition comprising the SELP is administered into or enters the aneurysmal sac. The SELP, once it forms the hydrogel, can comprise at least a quarter, a half, or three-quarters of the aneurysmal sac. In some aspects, the entire aneurysmal sac is filled with the SELP hydrogel.

[0089] In some aspects, no distal embolisms are present. Several embolics on the market have the adverse effect that if the embolic migrates away from the aneurysm it can cause an embolism elsewhere in the body. In some aspects, if the disclosed SELPs dilute causing a few of the SELP polymers to migrate away from the aneurysm, they will not cause a distal embolism elsewhere in the body. This provides an added safety mechanism for the disclosed methods.

[0090] In some aspects, the SELP remains in the aneurysm for one month. In some aspects, the SELP remains in the aneurysm for days, weeks, months or years. In some aspects, the SELP remains in the aneurysm for 1, 2, 3, 4, 5, 6, or 7 days. In some aspects, the SELP remains in the aneurysm for 1, 2, 3, or 4 weeks. In some aspects, the SELP remains in the aneurysm for 1, 2, 3, 4, 5, 6, 7, 8, 9, 10, 11, or 12 months. In some aspects, the SELP remains in the aneurysm for 1, 2, 3, 4, 5, 6, 7, 8, 9, or 10 years.

[0091] In some aspects, the disclosed composition further comprises a contrast agent. For example, a contrast agent can be, but is not limited to, micronized tantalum or an iodine based contrast. Examples of iodine based contrasts can be, but are not limited to, Iodixanol, iopamidol Ithalamate, iohexol, ioversol, iopromide, diatriazoate.

[0092] In some aspects, the composition further comprises a visualization agent. For example, a visualization agent can be, but is not limited to, a dye or a fluorophore.

[0093] In some aspects, the composition further comprises a therapeutic agent. For example, a therapeutic agent can be, but is not limited to, a growth factor, extracellular matrix (ECM) protein, or pro-clotting factor. In some aspects, a therapeutic agent helps promote healing and closure of the aneurysm sac.

[0094] 2. Arteriovenous Malformations (AVM)

[0095] Arteriovenous malformations (AVM) occurs when arteries and veins are not formed correctly in an area of the body. AVM is an abnormal tangle of blood vessels connecting arteries and veins. Disclosed are methods of treating AVM. In some aspects, SELPs can be used to embolize the blood vessel that feeds the AVM.

[0096] Disclosed are methods of treating AVM in a subject comprising administering to the subject a composition comprising a SELP. In some aspects, the SELP embolizes an abnormal blood vessel in the AVM.

[0097] Disclosed are methods of embolizing an AVM in a subject comprising administering to the subject a therapeutically effective amount of a composition comprising a SELP, wherein the SELP embolizes an abnormal blood vessel in the AVM.

[0098] In some aspects, the subject has been diagnosed with AVM.

[0099] Any of the disclosed SELPs or compositions comprising a SELP can be used in the disclosed methods. In some aspects, the SELP can be [GAGS(GAGAGS)n1(GVGVP)n2GXGVP(GVGVP)n3(GAGAGS)n4GA]n5GA, wherein X can be any amino acid, wherein n1 can be any number ranging from 2-10, n2 can be any number ranging from 1-50, n3 can be any number ranging from 1-50, n4 can be any number ranging from 2-10, and n5 can be any number ranging from 1-14. In some aspects, the SELP comprises the sequence of [GAGS(GAGAGS)2(GVGVP)4GKGVP(GVGVP)11(GAGAGS)5GA]6GA. In some aspects, the composition can further comprise a pharmaceutically acceptable carrier. Thus, the disclosed methods can use a pharmaceutical composition comprising any of the disclosed compositions or SELPs.

[0100] In some aspects, the SELP transitions from a liquid to a hydrogel at temperatures above 23° C. For example, the transition from room temperature (23° C.) to body temperature (37° C.) results in a shift from a liquid state to a solid gel.

[0101] In some aspects, a therapeutically effective amount is at least 1× the aneurysm volume. In some aspects, the therapeutically effective amount is at least 2× the aneurysm volume. In some aspects, the therapeutically effective amount is at least 3× the aneurysm volume. In some aspects, the therapeutically effective amount is at least 4× the aneurysm volume.

[0102] In some aspects, the composition is administered using a catheter. A catheter can be used in combination with balloon occlusion or in combination with other tools such as stents, or other flow restricting devices.

[0103] In some aspects, no distal embolisms are present. Several embolics on the market have the adverse effect that if the embolic migrates away from point of interest (e.g. the AVM) it can cause an embolism elsewhere in the body. In some aspects, if the disclosed SELPs dilute causing a few of the SELP polymers to migrate away from the AVM, they will not cause a distal embolism elsewhere in the body. This provides an added safety mechanism for the disclosed methods.

[0104] In some aspects, the SELP remains in the AVM for one month. In some aspects, the SELP remains in the AVM for days, weeks, months or years. In some aspects, the SELP remains in the AVM for 1, 2, 3, 4, 5, 6, or 7 days. In some aspects, the SELP remains in the AVM for 1, 2, 3, or 4 weeks. In some aspects, the SELP remains in the AVM for 1, 2, 3, 4, 5, 6, 7, 8, 9, 10, 11, or 12 months. In some aspects, the SELP remains in the AVM for 1, 2, 3, 4, 5, 6, 7, 8, 9, or 10 years.

[0105] In some aspects, the disclosed composition further comprises a contrast agent. For example, a contrast agent can be, but is not limited to, micronized tantalum or an iodine based contrast. Examples of iodine based contrasts can be, but are not limited to, Iodixanol, iopamidol Ithalamate, iohexol, ioversol, iopromide, diatriazoate.

[0106] In some aspects, the composition further comprises a visualization agent. For example, a visualization agent can be, but is not limited to, a dye or a fluorophore.

[0107] In some aspects, the composition further comprises a therapeutic agent. For example, a therapeutic agent can be, but is not limited to, a growth factor, extracellular matrix (ECM) protein, or pro-clotting factor.

[0108] 3. A Dual-Functional Embolization-Visualization System for Fluorescence Image-Guided Surgery

[0109] The concept that an interventionist can use embolics to enable florescent-guided surgery is an actively growing field. Fluorescent labels right now are allowed to diffuse throughout the body and then accumulate through various means. However, the field is plagued by low accumulation and poor contrast between tissue types. Having an interventionalist who is actively using imaging to guide and perform tissues. Many of the imaging techniques used by the interventionalists (particular x-ray-based technology, MRI, PET, etc.) are not able to be used during other types of surgery (open, endoscopic, robotic, etc.). If they can use embolics to place markers that the surgeon can see during their procedure the interventionalist can very effectively convey information on location of arteries and or margins of the malignancy.

[0110] Thus, disclosed are methods comprising administering an embolic to a subject in need thereof, wherein the embolic is conjugated to a visualization agent, wherein the embolic causes embolization and the visualization agent allows a surgical site to be identified. In some aspects the surgical site is a tumor.

[0111] In some aspects, the embolic can be one or more of the SELPs disclosed throughout.

[0112] In some aspects, the surgery is a surgery to resect a tumor. For example, the SELP can reduce intraoperative bleeding by causing an embolization at the tumor while at the same time deliver a visualization agent that demarcates the tumor margins. This process allows the tumor to be better visualized during surgery.

[0113] In some aspects, the subject in need thereof is a subject that needs surgery. For example, a cancer patient can be a subject in need thereof because they may need a tumor surgically removed.

[0114] Disclosed herein are methods comprising administering an embolic to a subject in need thereof, wherein the embolic is conjugated to a visualization agent. In some aspects, the embolic is a SELP embolic. In some aspects, the embolic is a coil, gelfoam, particle, or liquid sclerosants.

[0115] In some aspects, the embolic is Butyl cyanoacrylate (NBCA), ethiodol, ethanol, ethanolamine oleate, sotradecol, polyvinyl alcohol (PVA), Embolization microspheres, or a tissue adhesive.

[0116] A method comprising administering an embolic to a subject in need thereof, wherein the embolic is conjugated to a visualization agent, wherein the embolic causes embolization and the visualization agent allows a surgical site to be identified.

[0117] A method of identifying or labeling a surgical site in a subject comprising administering an embolic to the subject, wherein the embolic is conjugated to a visualization agent.

### EXAMPLES

### A. Example 1

[0118] 1. Introduction

[0119] Cerebral aneurysms (CA) rupture spontaneously and are the primary cause of severe hemorrhagic stroke. CA is a bulge in a weakened blood vessel wall that is present in 3.2% of the general population and is among the most common types of vascular malformations. Aneurysm rupture is fatal in 50% of cases and causes severe disability in over 50% of survivors. CAs are especially challenging to treat in part due to the risks associated with damaging nearby healthy tissues during the intervention.

[0120] Current therapies prevent rupture by diverting flow away from the aneurysm either by filling the aneurysmal sac with an embolic material or diverting flow using a stent-like device. However, these treatments fail due to recanalization in 20-57% of cases. An ideal treatment for CA would be minimally invasive, reinforce weakened vasculature, reduce shear forces on aneurysmal wall, and facilitate healing of the weakened vasculature. While embolization and flow diversion are the standards of care to prevent intracranial hemorrhage in high-risk patients, metal embolization coils and flow diversion devices require catheters that can accommodate the diameter of the device during delivery and anticoagulation therapy, cause artifacts on follow-up imaging via magnetic resonance imaging (MRI) or computed tomography imaging (CT), induce thrombus in undesirable locations, and can undergo recanalization. Liquid embolics have the potential to fill an aneurysm completely, but current liquid embolics are challenging to use due to their high viscosity, limited selection of compatible catheters, and dependence on potentially toxic organic solvents. Next-generation liquid embolics should have the advantages of not using potentially toxic organic solvents, have low viscosity to allow flow through small-diameter microcatheters, and have the capacity to carry various classes of therapeutics while providing durable embolization of the target lumen. Such an embolic would reduce mechanical strain by blocking flow to the aneurysmal sac and prevent the aneurysm from growing by reinforcing weakened vasculature.

[0121] One way to develop new liquid embolics is to use temperature-responsive protein-based polymers. Protein-based polymers have well-controlled structures derived from genetic instructions that define monomer sequence and molecular weight, allowing for the precise tailoring of structure to meet functional requirements. Silk-elastinlike protein polymers (SELPs) are one class of protein-based polymers that combine the solubility of mammalian elastin and the strength of silk to create macromolecules with tunable solubility and mechanical properties. Rational design of the ratio and sequence of silk and elastin motifs, polymer length, and concentration in solution dictate properties such as gelation rate, mechanical rigidity, and network density. Depending on sequence and length, many SELPs, when dissolved in phosphate-buffered saline (PBS), remain as injectable solutions at room temperature, pass through catheters without occluding, and rapidly transition to a solid hydrogel after injection. SELPs have demonstrated in vivo stability for greater than 12 weeks and have shown no evidence of toxicity or excessive inflammation.

[0122] SELPs can be liquid embolics. SELP compositions demonstrated acceptable rheological properties and clear embolic capability under flow conditions in vitro. In a rabbit model, selective occlusion of lobar hepatic arterial branches was shown. Described herein is the utility of SELPs as liquid embolics for occlusion of CA.

[0123] 2. Materials and Methods

[0124] i. Production of SELP Embolic

[0125] SELP 815K, structure shown in FIG. 1, which contains 8 silk-like motifs, 15 elastin-like motifs, and 1 lysine-substituted elastinlike motif per monomer repeat, was produced by expression in E. coli from a recombinant plasmid. Production was performed by previously reported procedures but scaled up to accommodate 10 L and 100 L batches. The SELP 815K was purified from the crude biomass and sheared as a 12% (w/w) solution in accordance with previously described methods with the addition of 316 stainless steel cooling loop submerged in 0-4° C. water bath and UV sterilization via a PHRED™ reactor (Aura Industries Inc., San Diego, Calif.) after the high-pressure homogenizer.

[0126] ii. Rheology

[0127] SELP 815K temperature response was characterized using a TA 550 stress-controlled rheometer (TA Instruments, New Castle, Del.) with a stainless steel 4°, 20 mm diameter cone and plate geometry. An oscillatory sweep was performed at 6.283 rad/s and 0.1% strain. The temperature was held at 23° C. for 30 min before it was increased (10° C./min) to 37° C. and held for 1 hour. Subsequent rheology to analyze viscosity and gelation kinetics of SELP 815K was conducted on a Malvern Kinexus Ultra+ Rheometer (Malvern Panalytical Ltd, Egham, Surrey, United Kingdom) with a 2°, 20 mm stainless steel cone and plate geometry. An active solvent trap was placed around the periphery of the plate to reduce water loss due to evaporation during testing.

[0128] Viscosity was measured from 1 to 37° C. (5° C./min) using an oscillatory procedure at an angular frequency of 6.283 rad/s, immediately followed by a 3-hour oscillatory sweep at 37° C. using 0.1% strain and an angular frequency of 6.283 rad/s to monitor gelation kinetics as well as G′ and G″. All tests were performed at least in triplicate.

[0129] iii. In Vitro Injection Testing

[0130] Injection testing was used to assess the injectability of SELP 815K and to compare it to clinically used devices. Catheter injections were made using Harvard Apparatus 22 V008 syringe pump (Harvard Apparatus, Holliston, Mass.) outfitted with a low profile USB output load cell (Omega Engineering, Karvina, Czech Republic). The Omega Digital Transducer software version 2.3.0. recorded the signal from the load cell. PVA-300 Foam Embolization Particles (Cook Medical LLC., Bloomington, Ind.), a Tornado® Embolization Coil (Cook Medical LLC., Bloomington, Ind.), and Isovue 370 (Bracco Diagnostics Inc., Monroe Township, N.J.) were used as references for the injection force of approved devices. Injections were performed using 1 mL BD syringes at a rate of 0.5 mL/min through a 2.4 Fr 150 cm long Merit Maestro Microcatheter submerged in a 37° C. water bath. A holder was used to ensure that each catheter was in a consistent position between tests. Clinical embolics were prepared according to manufacturer instructions and administered through the catheter, as described above. The catheter was flushed with cold saline prior to SELP injection. After the complete syringe of SELP 815K liquid embolic was injected, a syringe filled with cold saline was used to push the remaining SELP from the catheter.

[0131] iv. Cytotoxicity

[0132] L-929 murine fibroblast cell line (American Type Culture Collection, Manassas, Va.), selected for their recommendation by the U.S. Food and Drug Administration for cytotoxicity testing were cultured and seeded into 96-well plates (Thermo Fisher Scientific, Waltham, Mass.) as previously described. 1% Pen-Strep (Thermo Fisher Scientific, Waltham, Mass.) was added to the media. Cell viability was measured after 24 hours using a Cell Counting Kit-8 (CCK-8) (Dojindo, Kumamoto, Japan) per manufacturer's directions. Dulbecco's Phosphate-Buffered Saline (DPBS) and 1% Triton-X (Sigma-Aldrich, St. Louis, Mo.) were used as negative and positive controls, respectively. Clinically available embolic materials and contrast agents including Onyx® 18 (ev3 Inc., Plymouth, Minn.), Quadrasphere® (Merit Medical, South Jordan, Utah), PVA-300 microspheres (Cook Medical, Bloomington, Ind.), Isovue® 300 (Bracco, Milan, Italy) and Conray® 60% (Liebel-Flarsheim Company LLC, Raleigh, N.C.) were used to provide additional context.

[0133] To test cell viability, when encapsulated in SELP 815K, human umbilical vein endothelial cells (HUVEC) and L-929 cells were separately mixed into freshly thawed SELP 815K to create 10⁶ cells/mL suspensions. The SELP-cell mixtures were then loaded into tuberculin syringes and incubated at 37° C. for 30 min. The ends of the syringes were removed, the solid SELP-cell cylinders pushed out, and the resulting cylinders sectioned into 20 μL disks. The disks were placed, one disk per well, in 6 well cell culture plates (Thermo Fisher Scientific, Waltham, Mass.). Each well had 3 mL of media added, and the media was replaced every 48 hr. The cell culture plates were kept on rocker tables within a 5% CO₂ incubator at 37° C. Positive control gels were incubated in media with 0.1% Triton-X for 30 min at 37° C. to kill the cells. Live/dead cell viability assay (Thermo Fisher Scientific, Waltham, Mass.) was used to stain cells within the gels prior to imaging on an FV1000 Olympus Confocal Microscope using the manufacturer's recommended settings.

[0134] v. In Vivo Testing of SELP Embolic in a Rabbit Cerebral Aneurysm Model

[0135] A pilot study was conducted at North American Science Associates, Inc. (NAMSA) to assess the embolic potential of SELP 815K. Animals received daily health and behavioral assessments by trained personnel throughout the conduct of the study.

[0136] Aneurysms were generated in 15 New Zealand White rabbits in the right common carotid artery (RCCA). Aneurysm generation involved surgically isolating the RCCA, advancing a balloon catheter to the origin of the RCCA through a vascular sheath, inflating the balloon catheter to block flow into the RCCA, injecting Porcine Elastase (50 U/mL) into the RCCA, and incubating for 20 minutes to induce aneurysm formation. The balloon catheter was then deflated and removed, the vessel was rinsed with saline, the sheath and microcatheter were removed, and the distal RCCA was ligated. The embolization of the aneurysm models was performed 30-31 days after aneurysm creation to allow for the model aneurysm to mature and the animals to recover.

[0137] The right femoral artery was surgically accessed, a 6 Fr radial sheath was inserted into the femoral artery, and a bolus injection of heparin administered. A Cordis MPA 6F×100 cm guide catheter was directed under fluoroscopy to near the origin of the RCCA. A Transform® Compliant Occlusion Balloon Catheter (4 mm×10 mm×150 cm) (Stryker, Kalamazoo, Mich.) was placed near the aneurysm neck. An Excelsior® SL-10 microcatheter (150 cm long, 1.7 Fr, 0.60 mm) (Stryker, Kalamazoo, Mich.) was placed within the aneurysm. Angiography was performed to measure the aneurysm dimensions, and an ellipsoid model was used to calculate the volume of the aneurysm.

[0138] Prior to injection, the syringe with SELP 815 K was thawed in sterile saline. The injection volume of SELP was initially 1×, the estimated aneurysm volume plus the catheter hold up volume, but was gradually increased to 4×, four times the aneurysm volume plus the catheter hold up volume until the follow-up angiography showed >90% filling of the aneurysmal sac. Time of balloon occlusion was reduced from 30 min to 10 min after thorough occlusion of the aneurysm was established at the more extended time point. Slight negative pressure was applied to the microcatheter before it was retrieved past the occluding balloon. The balloon catheter was left in place to allow the SELP to solidify in the aneurysm. After the balloon catheter was removed, angiography was performed again, and the volume of occlusion visually assessed. Thirty days after initial embolization, the left femoral artery was surgically accessed, a guide catheter was used to deliver contrast, and angiography was performed to evaluate the occlusion of the aneurysm.

[0139] vi. Gross Evaluation of Embolization Via Necropsy

[0140] Macroscopic examination of the animals was performed by a veterinarian during necropsy. The aneurysm and surrounding vasculature were isolated, inspected, and photographed. Other tissues were examined and evaluated for lesions or any other signs of adverse effects. The right forelimb, brain, and the aneurysm with surrounding vasculature were collected and stored in 10% neutral buffered formalin for a minimum of 24 hours to achieve fixation.

[0141] vii. Histology

[0142] The aneurysm and surrounding vasculature were processed into a single block to provide anatomical context to the histology. At least two sections of the supraspinatus and subscapularis muscles from the right forelimb and two sections from the brain were obtained from each animal and processed for the evaluation of off-target effects, as these tissues are down-stream from the site of embolization. Each set of tissue sections was embedded in paraffin, sectioned into 5 μm slices, and stained with hematoxylin and eosin (H&E) by the research histology core at the University of Utah Huntsman Cancer Institute core facility. The aneurysms and associated vasculature were additionally stained using Masson's trichrome special stain.

[0143] viii. Statistics

[0144] Data were recorded, organized, and processed using Excel® (Microsoft, Redmond, Wash.). GraphPad Prism 5.0 was used to perform statistical analysis. All numerical data in this manuscript were assumed to be parametric in nature. One-way analysis of variance (ANOVA) with a posthoc Bonferroni multiple comparison test of data sets with 3 or more groups was used. A p-value of less than 0.05 was used as the threshold to ascribe statistical significance to a result.

[0145] 3. Results

[0146] i. SELP 815K Gel Formation

[0147] SELP 815K self-assembly responds dynamically to temperature. Elevation from room temperature (23° C.) to 37° C. initiated a rapid shift from a liquid state to a solid gel (FIG. 2). The growing separation between the storage and loss modulus is indicative of the transition to an increasingly stiff material. Transitioning from 23° C. to 37° C. changed the storage modulus over 5.5 logs in magnitude

[0148] ii. Shear Thinning Behavior of SELP 815K

[0149] SELP 815K demonstrates shear thinning behavior (FIG. 3A). As the shear rate increases and exceeds the intermolecular interactions between SELP chains, the viscosity of the system decreases. Newtonian fluids will experience a 3000 Hz shear rate during a 0.5 mL/min injection through a 1.8 Fr (0.60 mm) diameter catheter and ˜120 Hz shear rate at the aneurysm neck. SELP 815K has a viscosity of 0.30 and 0.14 Pas at 120 and 3000 Hz, respectively. Viscosity measured at 0.1% shear strain shows minor variations over 1-37° C. (FIG. 3B). Together, the shear thinning behavior and low viscosity variation over the temperature range show that SELP is easily injectable by hand under expected in vivo conditions.

[0150] iii. Injectability of SELP Embolic Material Through Clinical Microcatheters

[0151] SELP 815K, Isovue 370, PVA 300, and tornado coils were injected through a 2.4 Fr microcatheter to evaluate and compare the force required for injection. A syringe pump equipped with a load cell measured the force used to inject the four different materials. The catheter, submerged in a 37° C. water bath to simulate in vivo administration, was flushed with cold saline between each injection. SELP 815K required a lower injection force than Isovue 370, a clinical contrast agent, and 300-PVA embolic particles (FIG. 4A). During interventional procedures, vasospasms or other events can cause a pause in the administration of treatment. To simulate such occurrences, the injection was paused for 40 s to test if SELP 815K would solidify and clog the catheter. If the injection is paused during the procedure, SELP 815K does begin to transition to a gel within the catheter at 37° C., causing injection to become more difficult (FIG. 4B). However, even after an injection pause of 40 s, SELP does not adhere to the catheter walls and is still injectable as a liquid.

[0152] iv. In Vitro Cytotoxicity of SELP Embolic

[0153] SELP 815K, PBS injection, and PVA-300 embolic particles had similar and minimal impact on L-929 cell viability, indicating that they are not cytotoxic. Conray and Isovue 300 showed substantial depression of cell viability, and Onyx-18® showed similar viability as the negative control (FIG. 5A). Exposure to Onyx® at a 1:10 dilution over a 24 hr period resulted in no viable cells (not shown). Contrast agents and Onyx® exhibited toxicity from prolonged contact with cells under conditions where the opportunity for dilution was limited. L-929 and HUVEC cells incorporated into separate SELP 815K hydrogels showed a high degree of viability. During the 7-day observation period, the L-929 cells multiplied over time within the matrix, while the HUVEC population remained relatively constant (FIG. 5B). These results demonstrate that SELP 815K is cytocompatible.

[0154] v. In Vivo Testing of SELP Embolic in a Rabbit Elastase-Induced Aneurysm Model

[0155] SELP was able to produce effective occlusion in a rabbit model of CA (FIG. 6). Fifteen animals were enrolled in the study and had aneurysms surgically generated. Intake angiography one-month post aneurysm generation showed that the aneurysms formed in the rabbit RCCA had volumes of 46±1 mm³ (mean±st. dev.) (FIG. 9). Ten animals were selected for treatment, and four were selected as controls, based on the intake angiography.

[0156] SELP 815K, at 1× to 4× the estimated aneurysm volume, was injected into the aneurysm through a 1.7 Fr catheter by hand without difficulty. This increased injection volume compared to size estimate was to overcome the dilution effects of blood within the aneurysm during embolization. Initially, the balloon catheter blocked the aneurysm for 30 min (n=7), but after establishing procedure, reduction of time to 10 min (n=3) gave proper aneurysm occlusion. No appreciable reduction in function was noted after the decrease in time under balloon protection. Additionally, 1× aneurysm volume injection produced no visible signs of occlusion in the aneurysm after injection (n=1). Increasing the injection volume to 2× the estimated aneurysm volume resulted in 50% occlusion of the aneurysmal sack (n=1). At 3.5-4.0×, the aneurysms were nearly totally occluded, with only minor neck remnants present in a few cases (n=5).

[0157] In one case, the entire injection volume, 4×, was released into the bloodstream when the microcatheter slipped out of the aneurysm during the injection of the SELP 815K. Follow-up angiography showed no signs of distal embolization, and the animal showed no signs of distress. A second treatment of the aneurysm was performed.

[0158] During the one-month follow-up period, one animal that received SELP embolic suffered hind limb paralysis (3.5× aneurysm volume injection, 30 minutes of balloon protection). Necropsy showed probable trauma to the L5 vertebrae, and there was no indication that this was associated with device administration. The cause of the injury was undetermined. No other animal showed any adverse signs or distress in the 30 days follow-up.

[0159] Angiography 30 days post embolization showed continued embolization in most cases. In 2 of the 8 animals, where effective embolization with SELP was achieved under acute angiography, contrast entered slowly into the aneurysmal sac. However, the flow was slow and lethargic. Gross examination of the aneurysms at necropsy showed that the SELP gel was still present within the aneurysm but that the aneurysm had expanded around the gel or the gel had shrunk and become delaminated from the aneurysm wall. However, in both cases, the embolic was still occluding the majority of the aneurysm's volume.

[0160] vi. Histological and Gross Examination of SELP Embolization

[0161] Gross anatomical examination, performed by a veterinarian upon necropsy, showed no signs of adverse reaction 30 days after implantation for any of the animals that received SELP embolic treatment (n=9). Observation of yellow discoloration on the RCCA on both the untreated control animals and animals embolized indicates that it is the result of vessel ligation and exposure to elastase. In animals embolized with SELP, the aneurysm remained swollen post mortem. However, in the control animals, the aneurysm deflated due to the lack of internal support or pressure. No signs of distal embolization were observed even in animals where the SELP embolic escaped the aneurysmal sac during administration either due to dilution of the material causing a failure to gel or due to improper positioning of the catheter during injection of 4×SELP 815K (n=1).

[0162] Histologic evaluation showed SELP 815K forming robust gel structure confined to the inner lumen of the aneurysm (FIG. 7), consistent with successful embolization in 8 of 9 cases. SELP stained pale blue on Masson's trichrome special stain and appeared as homogenous nonreflectile and non-polarizable pink foreign material on the evaluated Hematoxylin and Eosin (H and E) stained sections. Smaller fragments of the same foreign material were also noted within the granulation tissue of the aneurysmal sac. There was a mild amount of associated foreign body giant cell reaction and admixed inflammatory response composed of histocytes, eosinophils, and lymphocytes. SELP was not identified outside the aneurysmal sac in the surrounding tissues or vessels histologically. Focal neointimal growth was noted at the neck of the aneurysms in cases with SELP embolization. The amount of new vascular endothelium observed one month after embolization varied between the animals. Histology from the 4^{th} animal treated, with 3.7×SELP volume administered, show regrowth across the entire aneurysm neck (FIG. 7). Due to the use of less than 4×SELP embolic administration, there is a neck remnant in the aneurysm. Additionally, both controls and experimental samples showed variable amounts of granulation tissue, mostly within the aneurysmal sac with hemosiderin deposition, hemorrhage, and organizing thrombus. A polarizable foreign material, most likely representing suture, was noted in only one case.

[0163] vii. Histological Evaluation of Downstream Tissues for Signs of Off-Target Embolization

[0164] Microscopic examination of the skeletal muscle obtained from the right forelimb revealed only focal inflammation in two samples, indicating the possibility of focal minimal and nonspecific skeletal muscle injury. The examined brain tissue showed no diagnostic abnormalities. Splenic tissue showed focal hemosiderin only without other significant histologic alterations. There was no identified tissue necrosis, significant fibrosis, intravascular embolic material, or prominent inflammatory infiltrates.

[0165] 4. Discussion

[0166] SELP 815K takes advantage of the intrinsic benefits of liquid embolic systems, including complete filling of the aneurysmal sac, injectability through the smallest of catheters, not requiring long-term antiplatelet therapy, and creating occlusion independent of thrombus. Rationale for this work is depicted in FIG. 8. SELP demonstrated the potential to meet all of these features in an in vivo rabbit model of CA.

[0167] The peak modulus of embolic gels should be at least that of the thrombi generated from coiled-based embolization devices. Fibrin clots have rheological storage moduli (G′) ranging from 150-1000 Pa. Materials that have high apparent viscosity within the aneurysm sac are beneficial as long as the material shear thins enough to be injectable via microcatheters. SELP 815K embolic achieved a storage modulus of greater than 1000 Pa within 1.5 min at 37° C. Additionally, the embolic was effectively integrated and deployed using a variety of catheters currently available in the interventionist's armamentarium forming a durable occlusion of the aneurysmal sac in less than 10 min. SELP 815K demonstrated shear thinning behavior, which is advantageous for use in microcatheters. Newtonian fluids experience ˜120 Hz from blood flow past the aneurysm neck and 3000 Hz for 0.5 mL/min injection through a 1.8 Fr microcatheter.

[0168] An additional advantage of SELP liquid embolics is their possible use for delivering biotherapeutics to the aneurysm sac. Embolics composed of EVOH or metal are poorly suited for delivering biotherapeutics due to the use of cytotoxic organic solvents and limited surface areas. SELP's aqueous environment is ideal for delivering biotherapeutics. SELP 815K demonstrated viability of loaded cells out to 1 week with no adverse effects observed, opening the door for locally directed embolotherapy with adjuvant cell therapy. Local delivery by SELP enhances the concentration of therapeutics within the aneurysm sac, prevents side effects from occurring in nontarget tissues, and increases the effective duration of treatment. SELP also provides a potential platform for delivering cell therapies selectively to the aneurysmal sac that show promise in improving aneurysm healing. Previous work shows SELP 815K to be compatible with local delivery of therapeutic agents, including stem cells, drugs, biotherapeutics, and gene therapy agents for periods of 28 days or longer in vitro and in vivo. Other liquid to solid transitioning embolics under investigation use chemical crosslinking agents that can produce toxic byproducts, high osmolarity solutions that have cytotoxic effects, or materials that have interfering mechanical properties. The limited surface area on stents and coils limits the number of cells that can be loaded, and cell seeding must be performed immediately prior to the administration, which complicates procedures. SELP can be loaded with cells throughout the entire material, drastically increasing the number of cells that can be delivered during treatment. Administration of cells within SELP localizes them to the aneurysmal sac, shields them from the immune system, and increases their efficacy by providing a support structure. The incorporation of therapeutics into a SELP embolic is a potential avenue for developing CA treatments that combine therapeutic elements with embolization. We envision future work creating bioactive embolic materials from the basic SELP backbone, where functional peptides accelerate endothelialization of the aneurysm neck, tune the mechanical properties of the material, or control the release of therapeutics.

[0169] Contrast ingress into the SELP embolized aneurysms was observed in 25% of animals (2 out of 8) after a successful initial embolization for 30 days. The ingress could be due to either growth/stretching of the aneurysm or shrinkage of the SELP embolus. It is unclear from either angiography and histology which of these two events occurred. However, for aneurysms treated with embolic coils, the clinical rate of recanalization has been reported as 25.5%. Further testing is needed to address this issue. In either case, the problem can be addressed through careful design. Adding peptide motifs that bind to endothelial cells, such as RGD integrin-binding domains, into the SELP backbone could help the SELP form intimal contact with the vascular endothelium. The addition of a particle or radiopaque particle, such as Ta, to SELP, will help reduce net volume change of the SELP if the contraction of the SELP matrix is an issue. This strategy has been previously used with dental adhesives to prevent contraction during and after curing. Additionally, SELP embolic could be combined with crosslinking agents to enable chemical bonding to the aneurysmal sac. Past work has shown this to be an effective technique where a robust SELP-tissue interface is needed with no localized toxicities. Additional work to understand and prevent the observed partial restoration of flow into the aneurysmal sacs of some aneurysms embolized with SELP is also needed. Preventing recanalization is key to the future translational potential of the SELP embolic system in the treatment of CA.

[0170] SELP did not embolize distal tissues in the event where materials were flushed into systemic circulation due to dilution impairing gelation kinetics. In a previous study, SELP embolic for transarterial embolism was injected at high concentrations and higher volumes into small vessels in a low-pressure liver, with no note of distal embolization in the lungs, the predominant down-stream vascular bed after passage through the liver from hepatic artery access. At concentrations below 2% (wt/wt), SELP 815K does not form a cohesive gel even after 24 hours at 37° C. Assuming a 0.5 mL/min injection rate into an artery flowing at 300 mL/min, reasonable for many high flow areas where aneurysms form, there is a 600× dilution in the SELP concentration right away, placing the material well below its minimum gel concentration and rendering it unable to form occlusive particles. Rapid dilution to less than 2% represents a 100× margin of safety. Further dilution will cause the SELP to form small globular protein structures at concentrations below 2 mg/mL of SELP. The intrinsic limitation for SELP gelation to occur only in areas where the material is maintained at gelling concentrations for sufficient time allows for the material to be safely administered even without being radiopaque, as we demonstrated in this in vivo pilot study.

[0171] This study demonstrates a high degree of potential for SELP embolic's use in the treatment of cerebral aneurysms. After developing the protocol with the administration of 4× SELP and the balloon inflated for 10 minutes, complete filling of the aneurysmal sac was observed (FIG. 7). SELP embolic demonstrated regrowth of vascular endothelium one-month post embolization, which is a highly promising indication (FIG. 7). The amount of regrowth of the endothelium varied between animals, and in the 4th study animal, treated with 3.7×SELP embolic, new endothelium regrowth over the complete aneurysmal neck is observed. Due to treatment with less than 4× the aneurysm volume, a small neck remnant is present. The formation of new vascular endothelium over the aneurysm neck would eliminate the chance of recanalization, a vast improvement on current embolization therapies, and the formation of a new vascular endothelium over the aneurysm neck is the ideal endpoint for aneurysm embolization. Current liquid embolic systems use potentially toxic organic solvents or release inflammatory byproducts from their polymerization. In one instance, the SELP embolic was accidentally injected outside the balloon occluded aneurysm directly into the bloodstream. No peripheral or off target embolizations were observed, and no deleterious effects on the animal health and wellbeing were observed during the 30-day observation period. Histological examination of the right forelimb and brain showed no signs of microemboli. SELP embolic is a liquid system that uses aqueous PBS as the liquid phase and solidifies in situ without producing any byproducts. For these reasons, SELP can be used as a next-generation embolic material.

### B. Example 2

[0172] 1. Introduction

[0173] Novel embolic therapies are needed to improve cerebral aneurysm (CA) healing and to reduce the risk of recanalization. Treatments for CA have remained virtually unchanged in the last 14 years in spite of the high morbidity and high probability of severe mental disability associated with this disease. CA is a common vascular malformation, comprised of a bulge in a weakened vessel wall that is present in 3.2% of the general population. While CAs are typically asymptomatic, they can rupture spontaneously and cause severe hemorrhagic stroke. Rupture is fatal in 65% of cases and causes severe disability in over 50% of survivors. CAs are especially difficult to treat due to the risks associated with damaging nearby healthy tissue during the intervention. Current therapies prevent rupture by diverting flow away from the aneurysm either by filling the aneurysmal sac with an embolic material or diverting flow using a stent-like device. However, current treatments often fail due to recanalization in 20-57% of cases for unruptured aneurysms. An ideal treatment for CA would be minimally invasive, reinforce weakened vasculature, reduce shear forces on aneurysmal wall, and facilitate healing.

[0174] Embolization and flow diversion are the standards of care to prevent intracranial hemorrhage in high-risk patients. However, metal embolization coils and flow diversion devices need larger catheters for delivery, require anticoagulation, cause artifacts on follow-up imaging via magnetic resonance imaging (MRI) or computed tomography imaging (CT), induce thrombus, and can undergo recanalization. Liquid embolics have the potential to fill an aneurysm completely, but current liquid embolics are challenging to use due to their high viscosity, limited selection of compatible catheters, and dependence on potentially toxic organic solvents. Next-generation liquid embolics will have the advantages of not using potentially toxic organic solvents, low viscosity to allow flow through small-diameter microcatheters, and have the capacity to carry various classes of therapeutics while providing durable embolization of the target lumen.

[0175] To create a liquid embolic agent that meets these requirements, a recombinant protein-based polymer with adjustable solubility and mechanical characteristics was used. Such an embolic can block flow to the aneurysmal sac reducing mechanical strain and reinforce weakened vasculature preventing the aneurysm from growing. Protein-based polymers have exquisitely defined structures derived from genetic instructions that define monomer sequences and molecular weight, allowing for the precise tailoring of structure to meet functional requirements. Silk-elastinlike protein polymers (SELP) combine the solubility of mammalian elastin and the strength of silk to create molecules with tunable solubility and mechanical properties. Properties such as gelation rate, mechanical rigidity, and network density are dictated by the ratio and sequence of silk and elastin motifs, polymer length, and concentration in solution. Previously, we demonstrated that two unique SELP constructs, SELP 815K and SELP 47K, when dissolved in phosphate-buffered saline (PBS) remain as injectable solutions at room temperature, are able to pass through catheters without occluding, and still rapidly transition to a solid hydrogel after injection. SELPs have demonstrated in vivo stability for greater than 12 weeks and have shown no evidence of toxicity or excessive inflammation.

[0176] Silk-elastinlike protein polymers can be designed safely and effectively to occlude cerebral aneurysms. SELP can be combined with radiopacifying agents to generate an injectable liquid solution that solidifies after injection. The objective of this work is to evaluate the basic physicochemical properties of embolic formulation for use in embolizing CA.

[0177] 2. Materials and Methods

[0178] i. Production of SELP Embolic

[0179] SELP 815K, which contains 8 silklike motifs, 15 elastinlike motifs, and 1 lysine-substituted elastinlike motif per monomer repeat, was produced from a recombinant plasmid (FIG. 1). The SELP 815K was purified from the crude biomass and sheared as a 12% (wt %) based on a modified version of what has previously been reported. SELP 815K was produced via expression of the pPT-317-SELP 815K-6 mer plasmid in ECR3 E. coli in a Bioflo™ 115 fermenter (New Brunswick Scientific Co., Edison, N.J.). Starting with 6.0 L of MM50 media, 0.4-0.8 L of inoculum was added to begin production. The fermenter was set to run at 30° C., pH of 6.8, airflow of 8-15 L/min., and agitation rate of 1000 RPM. The fermenter monitored pH and foam level and regulated with ammonium hydroxide and Antifoam 204™, respectively. Once the initial glucose was exhausted, the administration of a 600 g/L glucose and 200 mg/L kanamycin feed solution was initiated at a rate of 150 mL/hr. When the optical density at 600 nm reaches 80-100, SELP expression was induced by heating the culture to 42° C. for 30 min. The temperature was then decreased to 40° C. and the glucose feed reduced to 100 ml/hr. for 8 hrs. At the conclusion of the run, the wet biomass was harvested by cooling the culture to below 15° C. and centrifuging the media at 6800 rcf for 30 min. The amount of wet biomass collected ranged from 916-1474 g. The biomass was stored in a −80° C. freezer until purification. Purification began by thawing the biomass and mechanically lysing the cells using a microfluidics microfluidizer 110M at 10,000 PSI. DNA, cell debris, and other negatively charged impurities were removed via polyethyleneimine precipitation and centrifugation. SELP 815K was then precipitated from the supernatant with ammonium sulfate (AS) and solubilized using concentrated formic acid. After another round of AS precipitation, the polymer was further purified using both cation and anion exchange chromatography. Salt content and fluid volume were reduced at various stages using tangential flow filtration with a 35 kDa molecular weight cut off filter. The polymer was then lyophilized.

[0180] While on ice, lyophilized SELP 815K was dissolved in DPBS (Gibco, calcium and magnesium-free) to form a 12 wt/wt % solution to produce the liquid embolic material and then sheared at 15 000 PSI using an Avestin C5 homogenizer (Avstin, Inc., Ottawa, Ontario, Canada) fitted with a 1/16″ stainless steel cooling loop modification and a photochemical reactor enhancement detection (PHRED) UV-C system (Aurora, Inc, New York, N.Y.). The Avestin, with attachments, was operated while covered in ice inside a biosafety cabinet. The solution was sheared and sterilized using the PHRED UV-C system before loading in 3 mL BD syringes, and flash-frozen in liquid nitrogen. The syringes were loaded with ˜1 mL SELP 815K 12 wt/wt % liquid embolic. After flash-freezing, the syringes were loaded in zip lock bags and stored at −80° C. The sheared 12 wt/wt % SELP 815K was then flash-frozen in liquid nitrogen, stored at −80° C., and thawed at room temperature with deionized water just prior to use. Iothalmate (from Conray®, Liebel-Flarsheim Company LLC Raleigh, N.C.), an ionic contrast media, and iodixanol (from Visipaque™, GE Healthcare Inc., Princeton, N.J.), a nonionic contrast, were diluted with DPBS to achieve concentrations of 200 mg I/ml in solution and used in place of buffer to generate 12% (wt/vol) SELP embolic formulations. Micronized Tantalum (Ta) was incorporated into standard SELP embolic by mixing in an appropriate volume and mixing with a positive displacement pipettor, with care taken not to introduce air bubbles.

[0181] ii. Rheology

[0182] Characterization of SELP embolic temperature response was performed using a TA 550 stress-controlled rheometer (TA Instruments, New Castle, Del.) with a stainless steel 4° 20 mm diameter cone and plate geometry. An oscillatory sweep at 6.283 rad/s and 0.1% strain was performed on the material. The temperature was held at 23° C. for 30 min. before it was increased (10° C./min. ramp) up to 37° C. and held there for 1 hr.

[0183] Subsequent rheology to analyze viscosity, gelation kinetics, and mechanical durability of the radiopaque SELP was conducted on a Malvern Kinexus Ultra+ Rheometer (Malvern panalytical Ltd, Egham, Surrey, United Kingdom) with a 2° 20 mm stainless steel cone and plate geometry. An active solvent trap was placed around the periphery of the plate to reduce water loss due to evaporation during procedures.

[0184] Viscosity was measured from 1 to 37° C. (5° C./min) using an oscillatory procedure at an angular frequency of 6.283 rad/s. This was immediately followed by a 3-hrs. oscillatory sweep at 37° C. using 0.1% strain and an angular frequency of 6.283 rad/s to monitor gelation kinetics as well as G′ and G″. To assess yield strength, an oscillatory amplitude sweep was conducted at 37° C. from 0.01 to 100% strain. All runs were conducted at least in triplicate.

[0185] iii. Evaluation of Radiopacity

[0186] An Artis Q fluoroscope (Siemens Healthcare Diagnostics, Inc, Tarrytown, N.Y.) was used to acquire images for assessing the relative radiopacity of materials. Iodixanol contrast was serially diluted by 12.5% intervals from full strength and then loaded into 1.6 mm, 0.86 mm, and 0.58 mm diameter polyethylene tubes. A Tornado® Embolization Coil (Cook Medical LLC., Bloomington, Ind.) and a microcatheter tip (Merit Medical, South Jordan, Utah) were used as references of radiopaque devices. Graded wedges of 6061 Aluminum with steps ranging from 1 to 15 mm in 1 mm increments were used to provide a gradient and allow for quantitative assessment of radiopacity. Images were analyzed with ImageJ (National Institutes of Health, Bethesda, Md.) by taking the mean pixel intensity over the area covered by each sample. Radiopaque SELP embolic was also loaded into polyethylene tubes for assessment.

[0187] iv. Tilt Testing Method for Assessing Gelation

[0188] To evaluate gelation, 400 uL of SELP 815K was loaded into hermetically sealed vials, then tilted 90° and imaged using a digital camera. The vials were placed in a 37° C. water bath and imaged again after 30 sec., 1 min., 2 min., 3 min., 5 min., 10 min., 30 min., and 60 min.

[0189] v. In Vitro Injection Testing

[0190] Injection testing was used to assess the injectability of embolic formulations and compare them to clinically used devices as a point of reference. A Harvard Apparatus 22 V008 syringe pump (Harvard Apparatus, Holliston, Mass.) was outfitted with a low profile USB output load cell (Omega Engineering, Karvina, Czech Republic) with recordings of the signal made using the associated Omega Digital Transducer software version 2.3.0. PVA-300 Foam Embolization Particles (Cook Medical LLC., Bloomington, Ind.), a Tornado® Embolization Coil (Cook Medical LLC., Bloomington, Ind.) and Isovue 370 (Bracco Diagnostics Inc., Monroe Township, N.J.) were used as reference for the injection force of various materials. Injections were performed using 1 ml BD syringes at a rate of 0.5 ml/min. through a 2.4 Fr 150 cm long Merit Maestro Microcatheter submerged in a 37° C. water bath. A holder was used to ensure that each catheter was in the correct position. Clinical embolics were prepared according to manufacturer directions and administered through the catheter as described above. Prior to SELP injection, cold saline was flushed through the system. After the complete syringe was injected, a second syringe of cold saline was used to push the remaining SELP embolic from the catheter.

[0191] vi. In Vitro Embolization of a Model Aneurysm

[0192] In vitro embolization was performed on a simulated internal carotid artery aneurysm in a cerebrovascular controlled flow loop (Vascular Simulations, Inc., Stony Brook, N.Y.). The model was submerged in a water bath and maintained at 37° C. SELP was injected into the aneurysmal sac with a 2.3F 110 cm Maestro® microcatheter while a 3 mm Advocate™ balloon catheter was used to block the aneurysm neck. The catheters were removed after 5 min. and the embolic material was observed. A lubricating simulated blood system was made with PBS, mannitol (100 g/l), glycerol (2.5 g/l), and poloxamer 407 (2.5 g/l). The aneurysm has a neck diameter of 4.5 mm, height of 5.2 mm, and width of 4.7 mm with the feeding artery having a diameter of 3.7 mm. PBS flowed through the model at 300 mL/min. to match normal physiological flow through the ICA, which ranges from 246-317 ml/min. Premixed red dye (McCormick & Company, Inc., Baltimore, Md.) was used to provide visual contrast to validate flow. 0.1 mg FD&C emerald green dye (Spectrum Chemical Manufacturing Corp., Newbrunswick, N.J.) was added to 0.2 ml of SELP embolic immediately prior to embolization to facilitate visualization.

[0193] vii. Sterility and Endotoxin Testing

[0194] Bacterial endotoxin and product sterility tests were performed at Nelson Labs (West Jordan, Utah). All testing at Nelson Labs was performed in accordance with US FDA good manufacturing practice (GMP) regulations 21 CFR parts 210, 211, and 820. Tests were performed on thawed syringes of SELP 815K to verify the endotoxin level and product sterility of the batch. In accordance with USP<71>, a Sterility and MPN Method Suitability (B/F) test was performed to verify that the liquid embolic did not suppress bacteriostasis or fungistasis.

[0195] viii. Cytotoxicity

[0196] L-929 and HUVEC cells were cultured and seeded into 96-well plates as described in Section 5.2.8. However, 1% Pen-Strep was added to the media for the study as cells would be cultured for an extended period with multiple media changes. Viability was measured after 24 hrs using a Cell Counting Kit (CCK)-8 assay kit (Dojindo, Kumamoto, Japan) per manufacturer's directions. No treatment and 1% Triton-X were used as positive and negative controls, respectively. DPBS was used as an additional control to account for media dilution. Onyx 18™ (ev3 Inc., Plymouth, Minn.), Quadrasphere® (Merit Medical, South Jordan, Utah), PVA-300 microspheres, Isovue, and Conray 60% were used as reference materials. HUVEC and L-929 cells were gently mixed into freshly thawed SELP embolic. The SELP mixture was then loaded into a tuberculin syringe and incubated at 37° C. The end of the syringe was removed, and the resulting cylinder was sectioned into 20 μl disks and placed in media. Negative control gels were incubated in media with 0.1% Triton X for 30 min. at 37° C. Live/Dead Assay (ThermoFisher Scientific, Waltham, Mass.) was used to stain cells within the gels prior to imaging on an FV1000 Olympus Confocal Microscope using the manufacture's recommended settings.

[0197] ix. In Vivo Testing of SELP Embolic in a Rabbit Cerebral Aneurysm Model

[0198] Aneurysms were generated in New Zealand White rabbits in the right common carotid artery (RCCA). Briefly, aneurysm generation involves surgically isolating the RCCA, advancing a balloon catheter to the origin of the RCCA through a vascular sheath, inflating the balloon catheter to occlude flow into the RCCA, injecting Porcine Elastase (50 U/ml) into the RCCA, and incubating for 20 min. to induce aneurysm formation. The balloon catheter was then deflated and removed, the vessel was rinsed with saline, the sheath and microcatheter were removed, and the distal RCCA was ligated. Embolization of the aneurysm models was performed 30-31 days after aneurysm creation to allow for the model aneurysm to mature and the animals to recover.

[0199] The right femoral artery was surgically accessed, and a 6F radial sheath was inserted into the femoral artery and a bolus injection of heparin administered. A Cordis MPA 6F×100 cm guide catheter was directed under fluoroscopy to near the origin of the RCCA. A Transform® Compliant Occlusion Balloon Catheter (4 mm×10 mm×150 cm) (Stryker, Kalamazoo, Mich.) was placed near the aneurysm neck. An Excelsior® SL-10 microcatheter (150 cm long, 1.7Fr, 0.60 mm) (Stryker, Kalamazoo, Mich.) was placed within the aneurysm. Angiography was performed to measure the aneurysm dimensions, and an ellipsoid model per equation 6.1 (W: width, D: depth, H: height) was used to calculate the volume of SELP injection. The injected volume of SELP was stepped up from 1× the estimated aneurysm volume to 4× the aneurysm volume until >90% filling of the aneurysmal sack was observed on follow-up angiography. Time of balloon occlusion was reduced from 30 min. to 10 min. after through occlusion of the aneurysm was established at the longer timepoint. SELP was then prepared for injection by thawing the syringe in sterile saline. SELP proportional to the aneurysm volume plus the catheter hold up volume was injected. Slight negative pressure was applied to the microcatheter, and then it was retrieved past the occluding balloon. The balloon catheter was then left in place to allow the SELP to solidify. After the balloon catheter was removed, angiography was performed again and the volume of occlusion visually assessed. 30 days after initial embolization, the left femoral artery was accessed as described above and a guide catheter was used to deliver contrast to perform angiography.

V=(π×W×D×H)/6 Equation 6.1

[0200] x. Gross Evaluation of Embolization Via Necropsy

[0201] Macroscopic examination of the animals was performed by a veterinarian. The aneurysm and surrounding vasculature were isolated, inspected, and photographed. Other tissues were inspected and evaluated for lesions or any other signs of adverse events. The right forelimb, brain, and the aneurysm with surrounding vasculature were collected and fixed in formalin 10%.

[0202] xi. Histology

[0203] The aneurysm and surrounding vasculature were processed into a single block to provide anatomical context to the histology. At least two sections of the supraspinatus and suprapliaris muscles from the right forelimb and two sections from the brain for each animal were obtained and processed for the evaluation of off-target effects, as these tissues are down-stream from the site of embolization. Each set of tissue sections was embedded in paraffin, sectioned into 5 um slices, and stained with hematoxylin and eosin (H&E) by the research histology core. The aneurysms and associated vasculature were additionally stained using Masson's trichrome.

[0204] xii. Statistics

[0205] Data were recorded, organized, and processed using Excel® (Microsoft, Redmond, Wash.). GraphPad Prism 5.0 was used to perform statistical analysis. All numerical data in this manuscript were assumed to be parametric in nature. One-way analysis of variance (ANOVA) with a post-hoc Bonferroni multiple comparison test of data sets with 3 or more groups. A p-value of less than 0.05 was used as the threshold to ascribe statistical significance to a result.

[0206] 3. Results

[0207] i. Temperature Responsiveness of SELP

[0208] SELP 815K self-assembly responds dynamically to temperature. Elevation from room temperature (23° C.) to 37° C. initiated a rapid shift from a liquid-like state to a solid gel (FIG. 2). The growing separation between the storage and loss modulus is indicative of this transition to increasing stiff materials. The change in storage modulus was over 5.5 logs in magnitude, which is indicatory of adhesive potential.

[0209] ii. Incorporation of Radiopacifying Agents into SELP Embolic

[0210] The addition of radiopaque materials to the solution phase of SELP embolic allows for fluoroscopic visualization (FIG. 10). Incorporation into SELP embolic does not meaningfully impact radiopacity. The addition of 200 mg I/ml incorporated from iodinated contrasts is sufficient to enable ready visualization of SELP embolic through neuro-interventional microcatheters during delivery. This was assessed using the degree of contrast of clinically used microcatheters with radiopaque plastic tips as baseline and then assessing the contrast value between that tip and background using the average pixel intensity.

[0211] iii. Viscoelastic Properties of Radiopaque SELP Embolic

[0212] The incorporation of radiopacifying elements into SELP embolic has a dramatic impact on its viscosity profile. Addition of Ta microparticles, as is used in Onyx®, drastically elevates the viscosity of the system at all temperatures and under low shear conditions (FIGS. 11A and 11B). As the SELP network forms with rising temperatures, the viscosity increases. This is further exacerbated beyond simple additive effects by Ta particles creating increased drag within the solution (FIG. 11C). This relationship is confirmed by analyzing shear rate sweep of the materials. All SELP embolic formulations show shear thinning, but the SELP embolic with Ta microparticles has the greatest degree of shear-thinning behavior. As the shear rate increases, intermolecular interactions between SELPs are exceeded by the shear stress and subsequently break down. The SELP embolic with Ta powder demonstrated a higher degree of shear-thinning than any of the other formulations. Newtonian fluids will experience a 3000 Hz shear rate during a 0.5 ml/min. injection through a 1.8Fr (0.60 mm) diameter catheter. All SELP embolics had viscosities that allowed easy injection by hand under these conditions. A material that has a higher apparent viscosity within the aneurysm sac is actually beneficial as long as the material shear-thins enough to be injectable. SELP with either iothalamate or iodixanol had decreased shear-thinning behavior compared to SELP alone, indicating reduced intermolecular polymer interactions. The incorporation of contrast materials to SELP embolic had a pronounced effect on viscoelastic properties.

[0213] iv. Test Injections of SELP Embolic Material Through Clinical Microcatheters

[0214] SELP embolic required lower injection force than Isovue 370, a thick clinical contrast agent, or 300-PVA embolic particles at a 0.5 ml/min. injection rate (FIG. 12A). This indicates that SELP embolic is injectable under simulated clinical conditions. SELP embolic does begin to set within the catheter, causing injection to become more difficult (FIGS. 12B and 12C). However, SELP is still injectable and emerges as a liquid form in the catheter even after a paused injection. This allows the SELP to flow and conform intimately with the sac of the aneurysm and produce a thorough occlusion (FIG. 12D). Test injections with viscosity 5000 cP silicone oil standards could not be injected through the microcatheter and stalled the motor on the syringe pump. Injections of 1000 cP silicone oil in a 1.0 mL syringe required 34±6 N for injection through the microcatheter, which far exceeds the force of clinically used systems (FIG. 12B). SELP embolic was easily injectable under simulated clinical conditions.

[0215] v. Gelation Kinetics and Mechanical Strength of Radiopaque SELP

[0216] SELP 815K without any additional radiopacifying agents exhibited the greatest rate of gel formation (slope of line in FIG. 13A). SELP with tantalum had a higher initial storage modulus but did not see the same rise in viscosity in that initial time period. The SELP with iodixanol was thicker initially but was passed by the SELP loaded with iothalamate. This indicates that while iothalamate interferes with intermolecular interactions, it does not prevent the formation of the crosslinks among silk units in the gel. The addition of Ta to SELP increased the gel's ability to dissipate energy and thus have a greater capacity to withstand shear strain (FIG. 13B). All of the radiopaque materials had demonstrated the capacity to gel; however, the duration needed to achieve a robust gel varied (FIG. 13C). SELP embolic was able to pass the tilt test by min. 3. SELP with Ta was more viscous and was able to pass the tilt test by min. 2. SELP loaded with iodine-based contrast took between 15 and 30 min. to set to the point where it would pass the tilt test (FIG. 13D).

[0217] vi. In Vitro Cytotoxicity of SELP Embolic

[0218] SELP embolic had a similar effect on L-929 cell viability as either a PBS injection or PVA-300 embolic particles. It was less toxic to the cells than either Conray, Isovue 300, or Onyx-18 (FIG. 14A). Onyx at a 1:10 dilution over a 24-hr. period essentially killed all of the cells. Incorporation of organic iodine or tantalum into the SELP embolic increased its cytotoxicity. For iodinated contrasts, in particular, incorporation into SELP resulted in a material that was significantly more toxic than either contrast agent or SELP alone (FIG. 14B). However, the incorporation of Ta into SELP seemed to ameliorate some of its toxicity. L-929 and HUVEC cells showed a high degree of viability after incorporation into SELP. While the L-929 cells were observed to multiply over time within the matrix, the HUVEC population remained consistent over the 7-day observation period (FIG. 14C). Concerns over impaired mechanical function and increased cytotoxicity led us to pursue the standard SELP embolic for in vivo validation over any of the radiopaque formulations tested.

[0219] vii. Production of Clinical-Grade SELP Embolic

[0220] The suitability of the sterility test for SELP 815K 12 wt % liquid embolic was determined using 6 test organisms in two different media types. Growth in the bottles containing the liquid embolic test product was compared to the positive controls (FIG. 15). The test shows that the liquid embolic test product is not inhibitory to microbial growth. Test results for the suitability study are described in Table 6.1. Product sterility test was negative for growth in both soybean casein digest broth and fluid thioglycolate medium (FIG. 15), and bacterial endotoxin level was measured at 0.0425 EU/mL for SELP 815K liquid embolic, which is within FDA guidelines for neuro-interventional devices.

[0221] viii. In Vitro Embolization of a Model Human Aneurysm

[0222] SELP was injectable via microcatheter and able to produce an effective occlusion in a model aneurysm. The balloon catheter was able to maintain the SELP embolic within the aneurysm and allow the material to solidify and produce an effective occlusion of the aneurysm sac (FIG. 16). If the microcatheter was left in place during gelation, it could be easily removed without damaging the gels but did leave a cylindrical void in the gel. Removing the catheter immediately after injection resolved this issue. SELP gel was not adhesive to the surface of the catheter but remained in place after administration due to becoming interlocked with the aneurysm.

[0223] ix. In Vivo Testing of SELP Embolic in a Rabbit Elastase-Induced Aneurysm Model

[0224] SELP was able to produce effective occlusion in a rabbit model of CA (FIG. 6). Angiography showed that the aneurysms formed were between 6-10 mm deep with depth and width varying from 3-5 mm, with volumes 46±1 mm3 (mean±st. dev.). Test injections of contrast into the aneurysm showed the inflation of the balloon catheter and injections up to 4× the angiographically estimated volume of the aneurysm without any visibly evident release of contrast. SELP embolic at 1× to 4× the estimated aneurysm volume was injected into the aneurysm through a 1.7 Fr catheter by hand without difficulty. The balloon catheter was left in place for either 10 min. (n=3) or 30 min. (n=7). This increased volume compared to size estimate was to overcome the dilution effects of blood within the aneurysm during embolization. In one case, the microcatheter slipped out of the aneurysm during deployment, and the entire volume was released into the bloodstream and diluted. Follow-up angiography showed no signs of distal embolization and the animal showed no signs of distress. Additionally, 1× aneurysm volume injection produced no visible signs of occlusion in the aneurysm after injection (n=1). Increasing the injection volume to 2× the estimated aneurysm volume resulted in 50% occlusion of the aneurysmal sack (n=1). At 3.5-4.0×, the aneurysms were nearly totally occluded with only minor neck remnants present in a few cases (n=5). Once injection volume was established using 30 min. of balloon protection, the time under protection was dropped to 10 min. (n=3). No appreciable reduction in function was noted after the decrease in time under balloon protection.

[0225] During the 1-month follow-up period, one animal that received SELP embolic suffered hind limb paralysis (3.5× aneurysm volume injection, 30 min. of balloon protection). However, necropsy showed probable trauma to the L5 vertebrae, and it was determined that this was not associated with device administration. The cause of the trauma was undetermined. No other animal showed any negative signs or distress in the 30 days following the procedure.

[0226] Angiography 30 days post-embolization showed continued embolization in most cases. In 2 of the 8 animals, where effective embolization with SELP was achieved under acute angiography, contrast entered slowly into the aneurysmal sac. However, the flow was slow and lethargic. Gross examination of the aneurysms at necropsy showed that the SELP gel was still present within the aneurysm but that the aneurysm had expanded around the gel or the gel had shrunk and become delaminated from the aneurysm wall. However, in both cases, the embolic was still occluding the majority of the aneurysm's volume.

[0227] x. Histological and Gross Examination of SELP Embolization

[0228] Gross anatomical examination showed no signs of adverse reaction 30 days after implantation for any of the animals that received SELP embolic treatment (n=9) (FIG. 17). A yellow discoloration was observed on the RCCA on both the untreated control animals and animals embolized, indicating that it was the result of vessel ligation and exposure to elastase. In animals embolized with SELP, the aneurysm remained swollen post mortem. However, in the control animals, the aneurysm deflated due to the lack of internal support or pressure. No signs of distal embolization were observed even in animals where the SELP embolic escaped the aneurysmal sac during administration either due to dilution of the material causing a failure to gel (1× aneurysm volume injection n=1) or due to improper positioning of the catheter during injection (n=1)

[0229] Histology showed that SELP formed robust gel structure that conformed to the inner lumen of the aneurysm (FIG. 17). SELP is stained with a characteristic pale blue by Masson's trichrome. Neointimal growth was observed over the neck of the SELP lumen interface, which is a strong indication of successful embolization. SELP was observed in the granulation tissue within the RCCA above the aneurysm sac, indicating that SELP was sufficiently low in viscosity to penetrate the spongy tissue formed within the RCCA after aneurysm creation. Foreign body giant cells were observed around these pockets of SELP within the granulation tissue. SELP was not observed in any other portion of the surrounding tissues. In some samples, small pockets of red blood cells were found trapped between SELP and the aneurysm wall, indicating that small zones of entrapped blood were cut off by embolization. Thrombus was observed in the control aneurysms, but not on angiography, indicating that the clot likely formed during necropsy (FIG. 17).

[0230] xi. Histological Evaluation of Downstream Tissues for Signs of Off-Target Embolization

[0231] In neither the right forelimb or brain were there any signs of distal embolization or toxic events (FIG. 18). This was true even in animals where procedural errors resulted in SELP being flushed out of the aneurysmal sack and into circulation. This is a surprising observation, as it is expected that SELP would produce occlusive events. However, this was not found to be the case.

[0232] 4. Discussion

[0233] SELP embolic takes advantage of the intrinsic benefits of liquid embolic systems including complete filling of the aneurysmal sac, injectability through the smallest of catheters, not requiring long-term antiplatelet therapy, and creating occlusion independent of thrombus. SELP demonstrated the potential in an in vivo model of CA to meet all of these features.

[0234] The peak modulus of embolic gels should be at least that of the thrombi generated from coiled-based embolization devices. Fibrin clots have rheological storage moduli (G′) ranging from 150-1000 Pa. All of the SELP embolics tested in this chapter have far exceeded this requirement for strength. SELP embolic achieved a storage modulus of greater than 1000 Pa within 1.5 min. at 37° C. Additionally, the embolic was effectively integrated and deployed using a variety of catheters currently available in the interventionist's armamentarium. An additional advantage of SELP liquid embolics is their possible use for delivering biotherapeutics to the aneurysm sac. Embolics composed of EVOH or metal are poorly suited for delivering biotherapeutics due to limited surface areas and use of cytotoxic organic solvents, whereas SELPs aqueous environment is ideal for delivering biotherapeutics. SELP embolic demonstrated viability of loaded cells out to 1 week with no adverse effects observed. Local delivery by SELP enhances the concentration of therapeutics within the aneurysm sac, prevents side effects from occurring in nontarget tissues, and increases the effective duration of treatment. SELP also provides a potential platform for delivering cell therapies selectively to the aneurysmal sac that show promise in improving aneurysm healing. Other liquid to solid transitioning embolics under investigation use chemical crosslinking agents that can produce toxic byproducts, use high osmolarity solutions that have cytotoxic effects, or have interfering mechanical properties. The limited surface area on stents and coils limits the numbers of cells that can be loaded and cell seeding must be performed immediately prior to the administration, which complicates procedures. SELP can be loaded with cells throughout the entire material, drastically increasing the number of cells that can be delivered during treatment. Administration of cells within SELP localizes them to the aneurysmal sac, shields them from the immune system, and increases their efficacy by providing a support structure.

[0235] Incorporation of contrast agents reduced SELP biocompatibility. This is due to the intrinsic toxicity of the contrast material. However, SELP with contrast was still less cytotoxic than Onyx-18. While no precise values are reported in the literature for either the cytotoxicity or hemolytic potency for Onyx®, the United States Food and Drug Administration Humanitarian Use Device Exemption summary reports that test results for Onyx's cytotoxicity were grade 4 (severe) at a 1:1 dilution and grade 3 (moderate) at a 1:2 dilution. So this type of toxicity observed in cell culture is known. In the body, the high volume of dilution and convective clearance by blood flow quickly dilutes the dimethyl sulfoxide that forms the liquid component of the Onyx embolic. During cell culture studies, there is a limited volume of media and the duration of exposure is much higher than would be expected in vivo. The same scenario likely holds true for the radiopaque SELP formulations that used organically bound iodine. The observed increases in toxicity from the contrast were also probably due to contrast being held in close proximity to the cells rather than diffusing uniformly throughout the media.

[0236] Additionally, SELP embolic demonstrated the ability to incorporate cells in this study, opening the door for locally directed embolotherapy with adjuvant cell therapy. Previously, SELPs have been shown to be compatible for local delivery of therapeutic agents including stem cells, drugs, biotherapeutics, and gene therapy agents for periods of 28 days or longer in vitro and in vivo. The incorporation of therapeutics into a SELP embolic can be used for developing CA treatments that combine therapeutic elements with embolization.

[0237] Contrast ingress into the SELP embolized aneurysms was observed in 25% of animals (2 out of 8) after an apparently successful initial embolization for 30 days. This could be due to either growth/stretching of the aneurysm or shrinkage of the SELP embolus. It is unclear from either angiography or histology which of these two events occurred. However, clinically the rate of recanalization has been reported as 25.5% for aneurysm treated with embolic coils. Adding peptide motifs that bind to endothelial cells, such as RGD integrin-binding domains, into the SELP backbone could help the SELP form intimal contact with the vascular endothelium. Addition of a particle or radiopaque particle, such as Ta, to SELP will help reduce net volume change of the SELP, if the contraction of the SELP matrix is an issue. This strategy has been previously used with dental adhesives to prevent contraction during and after curing. Additionally, SELP embolic could be combined with crosslinking agents to enable chemical bonding to the aneurysmal sac. Past work has shown this to be an effective technique where a robust SELP-tissue interface is needed with no localized toxicities. Additional work to understand and prevent the observed restoration of flow into the aneurysmal sacs of some aneurysms embolized with SELP is also needed. Preventing recanalization is key to the future translational potential of the SELP embolic system.

[0238] SELP did not embolize distal tissues in the event where materials were flushed into systemic circulation due to dilution impairing gelation kinetics. In a previous study, SELP embolic for TAE was injected at high concentrations and higher volumes into small vessels in a low-pressure liver. There was also no note of distal embolization in the lungs, the predominant down-stream vascular bed after passage through the liver from hepatic artery access. SELP 815K below 2% (wt/wt) does not form a cohesive gel even after 24 hrs. at 37° C. Assuming a 0.5 ml/min. injection rate into an artery flowing at 300 ml/min., reasonable for many high flow areas where aneurysms form, there is a 600× dilution in the SELP concentration right away, placing the material well below its minimum gel concentration and rendering it unable to form occlusive particles. Rapid dilution to less than 2% represents a 100× margin of safety. Further dilution will cause the SELP to form small globular protein structures at concentrations below 2 mg/ml of SELP. The intrinsic limitation for SELP gelation to only areas where it is maintained at gelling concentrations for sufficient time allows for the material to be safely administered even without being radiopaque.

[0239] SELP embolic demonstrated regrowth of vascular endothelium 1-month post-embolization which is a highly promising indication. Formation of a new vascular endothelium over the aneurysm neck is the ideal endpoint for aneurysm embolization. Current liquid embolic systems use potentially toxic organic solvents or release inflammatory byproducts from their polymerization. Additionally, SELP embolic is a liquid system that used saline as the liquid phase and solidified in situ without producing any byproducts. For these reasons, SELP is a next-generation embolic material.

[0240] 5. Conclusions

[0241] A SELP embolic was produced using SELP 815K and was successfully deployed as an embolic for treating a simulated CA in a fluidic model of human aneurysm and in vivo using an elastase-induced aneurysm model in rabbits. The liquid embolic was able to be injected through a microcatheter and achieves durable gelation that is capable of occluding blood flow to the aneurysmal sac.

[0242] Those skilled in the art will recognize, or be able to ascertain using no more than routine experimentation, many equivalents to the specific embodiments of the method and compositions described herein. Such equivalents are intended to be encompassed by the following claims.

### C. Example 3

[0243] 1. Introduction

[0244] Distinguishing tumor margins from normal tissue in endoscopic surgery is challenging, as surgeons heavily rely on palpation and visual inspection of the tissue. This process is especially problematic for endoscopic surgery in the sinonasal cavity, as tumor margins can only be assessed via an endoscope. Maintaining good visualization of the surgical field and being able to identify normal tissue versus the tumor is paramount for safe and successful oncological surgery. Endoscopic surgical resection of hypervascular tumors can be challenging due to reduced visibility from bleeding and inability to palpate tissue, leading to difficulties in identifying normal tissue from tumor tissue and increasing the risk of surgical complications and suboptimal gross tumor resection. These challenges are compounded during the resection of hypervascular tumors in the sinonasal cavity, where excessive intraoperative bleeding can rapidly obscure the visual field due to the limited space and ability to access the tumor in this unique surgical corridor. Juvenile nasopharyngeal angiofibroma (JNA) is particularly difficult to remove, due to their location in the sphenopalatine foremen and proximity to critical structures such as the trigeminal nerve, internal and external carotid, optic nerve, orbit, and the brain. As surgery is currently the most common and effective form of treatment for JNAs, clear and defined margins are critical for achieving optimal outcomes. The development of new methods that can improve intraoperative visualization by reducing bleeding while enhancing demarcation of tumor margins could greatly improve safety and oncologic outcomes in these complex cases.

[0245] Fluorescence-based image-guided surgery has shown great potential to intraoperatively detect malignant tissue in endoscopic and robotic surgeries and distinguish tumor margins. Near-infrared (NIR) imaging with fluorescent NIR contrast agents utilize wavelengths in the range of 700-900 nm. NIR imaging minimizes background autofluorescence and allows for the greatest transmission of light within tissues. However, rapid dilution after administration and short circulation time result in low accumulation of dyes within the desired tissues. Embolization provides a unique opportunity to overcome both of these shortcomings, by locally delivering a higher concentration of a fluorescent dye, thereby reducing its clearance from the tumor by occluding blood flow.

[0246] Pre-surgical embolization is currently practiced for a variety of tumors in the head and neck in order to reduce intraoperative bleeding during surgical resection. Reduced intraoperative bleeding can help decrease operative time, improve visualization of the surgical field, decrease the risk of surgical complications in adjacent tissues, and decrease the risk of tumor recurrence. Current embolic materials are ill-suited for fluorescent marking due to poor tumor penetration and incompatibility with clinically approved dyes. Particle-based clinical embolics (i.e., microspheres and gelatin foams) can efficiently block tumor blood supply, but these materials fail to deeply penetrate the tumor vasculature. Liquid embolic agents, such as acrylic glues (Truefil™), can only penetrate blood vessels to a depth of 0.5 mm and only spontaneously solidify when polar or charged materials are added. An ideal embolic agent for pre-surgical embolization should be capable of: 1) delivering a marker to tumors, 2) deeply penetrating into and occlude vasculature, and 3) releasing the majority of its payload in accordance with surgical procedural timing.

[0247] Indocyanine green (ICG) has shown promise in head and neck surgical procedures for a variety of cancers. ICG binds avidly to albumin and other globular proteins that naturally extravasate into tissue at the capillary level. ICG accumulates preferentially in tumor tissue due to poor lymphatic recycling of albumin and other blood proteins compared with healthy tissues. This difference in clearance can create a well-defined boundary that corresponds to tumor margins. Rapid dilution after intravenous administration and rapid clearance by the liver, half-life of only 3-5 min., limit ICG's ability to accumulate in tumors and successfully demarcate tumor margins. Only approximately 0.05% of an ICG dose typically remains within the tumor by the time of surgery. This challenge could be overcome by locally delivering ICG and restricting blood flow within a tumor.

[0248] Silk-elastinlike protein (SELP)-based embolics have the potential to locally deliver ICG while achieving effective embolization. SELPs are genetically engineered protein-based polymers that combine the temperature-responsive solubility of elastin and the physical strength of silk. The ability to control SELPs at a molecular level allows the precise tailoring of protein structure to function in a predictable and exquisitely tunable fashion. SELPs dissolved in saline are highly biocompatible and have mechanical properties for use as an in situ gelling embolic. SELPs represent an innovative solution to overcome the shortcomings of current clinical tools for embolizing hypervascular tumors. These embolics can deeply penetrate the tumor before rapidly transitioning to form a solid gel, use a biocompatible aqueous solution, and can carry up to 50 mg/mL of loaded compounds. Described herein is the development of a dual-function SELP-based embolization-visualization system that can reduce intraoperative bleeding, while simultaneously delivering ICG to fluorescently demarcate tumor margins. We characterized the biophysical properties of SELP in response to ICG incorporation and penetration efficiency in phantom agar tissues. The dual-functionality of the SELP-ICG system was then evaluated in a microfluidic model of tumor vasculature. To assess the biocompatibility of this new system, the viability of model mammalian cell lines in response to SELP-ICG incubation was tested.

[0249] 2. Materials and Methods

[0250] i. Materials

[0251] SELP 815K was expressed in Escherichia coli and purified, characterized, and shear-processed as previously described (FIG. 19A). ICG sodium salt (see FIG. 19 B) was obtained from Sigma Aldrich (St. Louis, Mo.). Dulbecco's Phosphate Buffered Saline (PBS), agar, Dulbecco's Modified Eagle Medium/Nutrient Mixture F-12 (DMEM:F12), TrypLE™ Express Enzyme with no phenol red, trypan blue, and Fetal Bovine Serum (FBS) were obtained from ThermoFisher Scientific (Waltham, Mass.). Triton X, sodium azide, Endothelial Cell Growth Medium (ECGM), and bovine serum albumin (BSA) were obtained from Sigma Aldrich (St. Louis, Mo.). FD&C red dyes 40 and 3 were obtained in a premixed solution (McCormick, Hunt Valley, Md.) to serve as visual indicators. L-929, murine fibroblasts, and human umbilical vein endothelial cells (HUVECs) were obtained from the American Type Culture Collection (ATCC) (Manassas, Va.).

[0252] ii. Effect of ICG on SELP Hydrogels

[0253] To evaluate the effect of ICG on the swelling behavior of SELP hydrogels, frozen SELP 815K 12% (wt/wt) was thawed, mixed with 0, 0.1, 1.0, 5.0, and 10.0 mg/mL ICG, and then incubated for 12 hrs. at 37° C. in tuberculin syringes. These concentrations spanned the range above and below concentrations used clinically for ICG injections. The end of the syringe was removed, and the SELP-ICG mixture was cut into 20±1 μL cylindrical samples (˜3.5 mm in diameter, ˜2 mm in height) and weighed. These were placed into 1.0 mL of PBS and incubated for 2 weeks at 37° C. Samples of SELP with and without 0.5 mg/mL ICG were flash-frozen in liquid nitrogen and lyophilized at −50° C. and <0.06 mbar for 4 days on Labconco lyophilizer (Kansas City, Mo.). Free ICG and ICG incorporation into the gels were quantified using absorbance detection at 780 nm with a SpectraMax M2 spectrophotometer (Molecular Devices, Sunnyvale, Calif.). The swelling ratios and soluble fractions were calculated. Scanning electron microscopy (SEM) was performed on an FEI Quanta 600F (ThermoFisher Scientific, Waltham, Mass.) as previously described to evaluate the possible effects of ICG incorporation on SELP microstructure morphology.

[0254] iii. ICG Release from SELP

[0255] A release study was conducted to determine the effect of ICG concentration on its release profiles from the hydrogels. SELP-ICG was loaded with concentrations of dye appropriate for imaging after local delivery (0.005, 0.05, and 0.5 mg/mL) by directly mixing the powdered dye into the polymer solution. Beginning with 20 μL of SELP 815K 12% (wt/wt) (n=5), a concentration that has previously demonstrated embolic potential, was injected into a 1 mL vial through a 30 g needle with a chilled Hamilton syringe. SELP was then incubated at 37° C. for 12 hrs. To begin the release study, 1 mL of prewarmed (37° C.) PBS supplemented with 50 mg/mL of bovine serum albumin (BSA) was added to the samples. As a control for ICG stability, 1 mg/mL of ICG dissolved in release media was used and treated identically to samples. Prior to injection, the release media was prewarmed to 37° C. At designated timepoints (0, 0.25, 0.5, 1, 3, 6, 12, 24, 36, and 48 hrs.), 100 μL of media was removed and replaced from each vial, added to a 96-well plate, and assayed at 780 nm on a SpectraMax M2 spectrophotometer. To analyze the release profile of ICG from the SELP hydrogels, the data were fit to the Korsmeyer-Peppas model (Equation 5.1).

Mₜ/M_{∞}=ktⁿ (5.1)

[0256] iv. Viscoelastic Properties of SELP Embolic Loaded with ICG

[0257] The following embolic properties are desirable: an initial injectable viscosity, a rapid transition to an occlusive gel after injection within the target vasculature, and the ability to achieve a modulus capable of resisting intraarterial pressures. To quantify these features, the viscoelastic properties were evaluated using rheology as previously described. Samples were analyzed using a temperature ramp from 18 to 37° C. (5.8° C./min) and a 20-mm, 4° cone geometry on a TA AR550-Stress Controlled Rheometer (New Castle, Del.). This was followed by a 3-hr. oscillatory time sweep at 37° C., 0.1% strain, and an angular frequency of 6.283 rad/s. Gelation and the potential for phase separation were evaluated using a tilt test. SELP 815K 12 wt % (400 μl) with 0.5 mg/mL of ICG was cooled in a glass chromatography vial (ThermoFisher Scientific, Waltham, Mass.) on ice. The vials were then hermetically sealed and placed into a 37° C. water bath in an upright position for 1, 2, 3, 5, 10, 15, 30, and 60 min. At each timepoint, each vial was briefly removed and photographed after being tilted 90°. The images were globally white-balanced and cropped to remove excess background.

[0258] v. ICG Release and Diffusion Behavior in Tissue Phantoms

[0259] Tissue-mimicking agar phantoms were used to measure ICG release from SELP and its diffusion behavior after simulating endovascular embolization. The agar phantoms were generated by dissolving 35 g/L of BD Bacto agar in deionized water prior to being autoclaved[22]. The solution was then cooled to <50° C., to which 200 mg/L of sodium azide and 35 g/L of BSA were added to respectively prevent bacterial growth and add a structural protein component. The phantom molds were cast in Cellstar® 6-well cell culture plates (Greiner, Austria) with segments of polyethylene (0.7-mm outer diameter) (Cole-Parmer, Vernon Hills, Ill.) that were threaded through pre-punched holes into each well. This process created a small void that ran through the center of each phantom to mimic the size of a blood vessel running through tissue that could be selectively embolized using clinical microcatheters. Each well was filled with 15 mL agar and allowed to gel at room temperature for 24 hrs. ICG was imaged within the phantoms using a 5-sec. exposure time and 780 nm excitation and an 831 nm emission with the Spectrum In Vivo Imaging System (IVIS) (Caliper Life Sciences, Massachusetts, USA). ICG (0.5 mg/mL) release from SELP and diffusion behavior was tested in triplicate for each phantom type. A non-SELP control, 0.5 mg/mL ICG in 50 mg/mL BSA in PBS, was tested to evaluate if SELP impaired the partitioning of ICG into the simulated tissue in each phantom type. ICG diffusion behavior was quantified by measuring its diffusional distances from the void over 48 hrs. A MATLAB script (The Mathworks, Inc., Natick, Mass.) was used to calculate the mean intensity of the fluorescent signal at varying distances from the center of the gel in images acquired on the IVIS. The radius at which the signal reached 10% of the maximum fluorescence intensity for each gel was designated as the visual front of diffusing dye.

[0260] vi. Correlation of ICG Imaging Between IVIS and a Clinical Endoscopic System

[0261] A Karl Storz 4 mm×18 cm ICG endoscope (Karl Storz, Tuttlingen, Germany) attached with a Power LED light source with fiber optic ICG cable and Karl Storz Image is Video System with ICG High Def Camera Head (Karl Storz, Tuttlingen, Germany) was used for imaging the ICG at different concentrations. ICG solution was prepared by mixing 25 mg of ICG in 1 mL of water, resulting in a 25 mg/mL solution. The solution was diluted by half in subsequent wells of a 96-well plate, and the last well was filled with only water (negative control). The endoscope's imaging head was held 4 mm above the surface of the 96-well plate to acquire images. Fluorescent light was captured by the camera and shown as blue. The intensity of the fluorescent light was quantified using the Zen Lite Blue software version 2.6 (Zeiss, Oberkochen, Germany). A fixed area of equal size for each well was selected, and the fluorescence was quantified by taking the arithmetic mean intensity of blue contribution for that particular region in pixels. IVIS was used to image ICG at different concentrations. Similar solutions of ICG were prepared and loaded in a 96-well plate. The same 96-well plate imaged with the Karl Storz endoscope was set on the sample stage. Living Image® Software (PerkinElmer, Massachusetts, USA) was used to take images of the 96-well plate. All the settings for acquiring the image were done in the software (Exposure time—1.50 sec.; Field of view—12.5 cm; F/stop(aperture)—2; Pixel Binning—medium). An overlay image combination of photographic and fluorescent image was recorded. The region of interest (ROI) tool was used to perform quantification of the surface intensities. Equal size ROIs were drawn on each well of the plate, and the radiant efficiency was recorded by the software for each defined ROI. The signal from the negative control well was subtracted to correct for background signal. The various radiant efficiencies were compared to different concentrations of ICG and results were plotted. Linear regression statistical analysis was also performed using GraphPad Prism 5 (GraphPad Software, San Diego, Calif.) to find correlations between the endoscopic fluorescent imaging and IVIS radiant efficiencies of ICG.

[0262] vii. Embolization of Microfluidic Models of Tumor Vasculature

[0263] Highly selective embolization requires the ability to pass through clinical microcatheters with small diameters and then selectively occlude target vasculature. To simulate tumor vasculature, a microfluidic device was designed based upon the Murray-Hess Law as previously described[16]. Devices representing tortuous conduits and of branching networks of tumor vasculature were constructed using Sylgard 184 silicone elastomer (Dow Corning, Midland, Mich.). Silicone was prepared per the manufacturer's instructions, de-aerated, poured over the mold, and cured at 153° C. After curing, the mold was removed, and the silicone was plasma-bonded to a glass microscope slide using an Enercon Dyne-A-Mite Air Plasma Surface Treater (Enercon, Menomonee Falls, Wis.). During testing, three microfluidic devices were connected in parallel to a central syringe pump. A 20-mL syringe was filled with PBS with red food color (McCormick & Company, Inc., Baltimore, Md.) for visualization. Saline was pumped through the devices at a flow rate of 0.63 mL/s to achieve a pressure of 40 mmHg, modeling rates and pressures found within blood vessels of similar cross-sectional area. SELP with 0.5 mg/mL ICG was injected into the microfluidic tumor model devices using 2.3-Fr, 110-cm microcatheter (Merit, South Jordan, Utah) submerged in a 37° C. water bath to simulate clinical procedures. The second and third devices, representing collateral vascular beds that feed nonmalignant tissue around the tumor, were connected in parallel to the test chip in order to evaluate the potential off-target embolization due to retrograde flow and provide an alternate path of flow after the occlusion of the tumor vasculature. After each test, the embolized device was replaced and the other chips investigated for evidence of occlusion using IVIS as described in the diffusion study. If no occlusion was observed, the collateral chips were reused. This experiment was replicated 3 times.

[0264] viii. Cytotoxicity of SELP ICG

[0265] L-929 and HUVEC were selected for use in assessing the cytotoxicity of the SELP-ICG embolic based upon their utility with respect to regulatory testing and relevance to the intended application of the device. L-929 cells are commonly used for FDA testing of contact cytotoxicity of medical devices, such as embolics. HUVEC represents a human cell line, another common cell that is also frequently used for evaluating cytotoxicity. Additionally, HUVEC represents vascular endothelial cells that embolic SELP will be in close contact with during in vivo administration. L-929 fibroblasts were grown with Dulbecco's Modified Eagle Medium (DMEM):F12 (1:1) media, supplemented with 10% FBS, and HUVECs were grown in ECGM. The cells were grown in T-75 flasks at 37° C. with 5% CO2 and passaged at 80-95% confluency. Cells were suspended using TrypLE™ Express Enzyme with no phenol red according to the manufactures protocol. The viability of cells was assessed using 0.4% trypan blue stain using a Countess Automated Cell Counter (ThermoFisher Scientific, Waltham, Mass.). L-929 cells were seeded into new T-75 flasks with 3×10⁵ to 6×10⁵ viable cells. HUVECs were seeded into new T-75 Flasks with 1×10⁵ to 7×10⁵ cells for each passage. Only cell cultures with greater than 90% viability, typically >95%, were used in assays. Cells were seeded into 96-well plates for testing before their 6th passage. SELP 815K 12% (wt/wt) with 0.5 mg/mL ICG and PBS with ICG 0.5 mg/mL were used as test samples and serially diluted to generate standard concentration curves. Viability was measured after 24 hrs using a Cell Counting Kit (CCK)-8 assay kit (Dojindo, Kumamoto, Japan). No treatment and 1% Triton-X were used as positive and negative controls, respectively. LD50 values were determined by fitting the data to a Hill plot with a variable slope using GraphPad Prism 5.0.

[0266] ix. Statistics

[0267] The data were collected and processed using Excel (Microsoft, Redmond, Wash.), and statistical and regression analyses were performed using GraphPad Prism 5.0. Outliers were identified using a Grubb's Test and excluded from cytotoxicity testing. The data analyzed in this study were assumed to be parametric in nature. Paired sets of data were analyzed using the Student's T-test for paired sets of data and one-way analysis of variance (ANOVA) with a post-hoc Bonferroni multiple comparison test to compare data sets with 3 or more groups. Least squares regression was used to assess linear correlations in the data. A p-value of less than 0.05 was used as the threshold for statistical significance.

[0268] 3. Results

[0269] i. Effect of ICG on SELP Hydrogels

[0270] ICG increases SELP 815K polymer interactions, resulting in the formation of a denser hydrogel matrix. The soluble fraction of SELP is decreased by the addition of ICG (FIG. 20A). The swelling ratio of the SELP hydrogels significantly decreases with increasing concentrations of ICG. At 0.1 mg/mL ICG, the swelling ratio is decreased by 8.2% and at 10 mg/mL ICG, the swelling ratio decreased by 15.2% (FIG. 20B). While statistically significant, the relatively modest decrease in swelling ratio should not impact the gel's ability to occlude blood flow. Both of these trends indicate increased polymer-polymer interactions due to the presence of ICG. SEM imaging revealed visible changes in SELP microstructure after ICG incorporation (FIG. 20C). The matrix became appreciably denser with smaller voids and thicker partitions. Taken together, the addition of ICG to SELP tends to increase polymer interactions, leading to the formation of denser hydrogel matrices, which can alter viscosity and release kinetics.

[0271] ii. ICG Release from SELP

[0272] FIG. 20C demonstrates that ICG incorporation altered the microstructure of SELP in a concentration-dependent fashion. To investigate if these structural changes had an effect on ICG release, the release kinetics were evaluated by varying ICG-SELP compositions. ICG concentrations were selected to maximize the potential fluorescent signal in the context of tumor vasculature embolization and self-quenching behavior of ICG. The materials were injected through a 30 g needle and formed solid cohesive droplets at the bottom of the vials that did not phase separate. These features are necessary for the material to be able to be injected endovascularly, maintaining a high enough concentration to gel, and occlude the whole vascular lumen to prevent blood flow after administration. Burst release was greatest for 0.005 mg/mL group, which released 39±12% of the ICG payload within 5 min. of injection (FIG. 21). However, the relative burst release for higher concentrations of ICG was significantly reduced. The burst release was only 7±2% for the 0.05 mg/mL ICG group. The release profiles for 0.5, 0.05, and 0.005 mg/mL of ICG were consistent with first-order release kinetics and had n values ranging from 0.151±0.029 to 0.417±0.011 (mean±standard error) in the Korsmeyer-Peppas model, indicating that quasi-fickian diffusion was mediating the release of ICG. The 0.5, 0.05. and 0.005 mg/mL ICG gels released 84±6.0%, 72±8.0%, and 83±8.0%, respectively, of their payloads within 24 hrs., which is functional for pre-surgical embolization procedures as they are performed the day prior to tumor resection. Based upon these results and considering the anticipated volume of distribution of the dye during intravascular release within a tumor, SELP loaded with 0.5 mg/mL of ICG was selected for testing as an embolic material.

[0273] iii. Viscoelastic Properties of SELP Embolic Loaded with ICG

[0274] The incorporation of ICG increased the degree of the thermal viscoelastic response of SELPembolic solutions. Initially, the difference between SELP and SELP-ICG was negligible at 18° C. (120±13 cP and 123±17 cP, respectively). However, as the samples warmed, ICG incorporation accelerated the temperature-induced increase in SELP viscosity. At 37° C., the viscosity of SELP and SELP-ICG increased to 175±19 cP and 264±42 cP, respectively (FIG. 22A). This behavior indicates a 261% increase in the magnitude of the temperature-induced viscosity enhancement from 18 to 37° C. for SELP, due to ICG incorporation. However, below room temperature, the viscosities remain low enough for easy injection (FIG. 22B). ICG incorporation additionally increased the gelation kinetics and peak strength of the SELP embolic. The slope elevation of the storage modulus during an oscillatory time sweep at 37° C. indicates faster gelation (FIG. 22C). The 45.9% increase in SELP modulus due to ICG incorporation was highly significant (p<0.001, FIG. 22D). Within 2 min. at 37° C., SELP-ICG formed a network capable of resisting gravitationally-induced flow. A gradual increase in opacity with time indicates the continuing formation of microdomains within the SELP structure that scatter light and increasing the modulus of the material (FIG. 22E). No macroscopic phase separation was observed, indicating that the transition from an injectable liquid to an occlusive solid was isovolumetric, which is optimal for embolization.

[0275] iv. Release and Distribution of ICG in a Tissue Phantom

[0276] To fluorescently demarcate tumor margins, ICG must be released from SELP and diffuse into the tissues following embolization of the target vasculature. SELP-ICG was easily injected into tissue phantoms that simulated endovascular embolic delivery and subsequent release of ICG into the surrounding tissue. PBS was held within the channel by sealing the end prior to administration, which would correspond to embolization with a particle-based system immediately following ICG injection via a microcatheter. The incorporation of BSA into the phantom significantly increased both the relative intensity of the ICG and the distance by which ICG diffused within the phantom (FIG. 23A). Within 24 hrs. after SELP delivery, PBS control and ICG had diffused to a depth of 3.5±0.7 mm and 4.2±0.4 mm, respectively. In the phantoms without BSA, the ICG had only diffused to a depth of 2.1±0.6 mm, whereas PBS was measured at 3.4±0.4 mm. The difference between SELP with and without BSA is greater than that observed with PBS. Albumin enhanced diffusion and release of ICG from SELP within tissue phantoms. SELP reduced the distance ICG diffused likely by restricting the rate at which the dye was able to partition into the phantoms.

[0277] v. Imaging of ICG with Preclinical Tools Corelates with Clinically Available Endoscopics

[0278] Imaging on IVIS correlates with imaging findings with a clinical endoscope system. The quenching effects of the ICG can clearly be seen in the images from both IVIS and the Karl Storz ICG endoscope (FIG. 24A). The optimal concentration of ICG was 0.012 mg/mL for both systems (FIG. 24B). Fluorescence intensity between the two systems was linearly correlated (FIG. 24C). The excitation light used by the endoscope gave the wells a green cast. At high concentrations of ICG, this light was absorbed by the ICG, resulting in darker wells. This confirms that IVIS is a capable tool for being able to assess the utility of ICG delivery systems for use with the Karl Storz ICG endoscope.

[0279] vi. Embolization in a Microfluidic Model of Tumor Vasculature

[0280] The ability to deliver locally via microcatheter and selectively occlude vasculature are essential features of embolic devices. The embolic capability of SELP-ICG was tested using custom-made, microfluidic tumor vasculature models with clinical microcatheters for simulating the anticipated implementation of the device (FIG. 25A). The microfluidic models went through several phases of design to minimize potential dead space (FIGS. 26 and 27). The flow-through resistance was 0.052 mmHg*min/L for 3 devices in parallel compared to 0.105 mmHg*min/L for a single vascular model. These resistances are not typical in human vascular beds, suggesting that the models herein are at least as challenging if not more so than in vivo vasculature of equivalent size. SELP-ICG was injected through a 2.3-Fr, 110-cm catheter submerged in a 37° C. water bath. SELP-ICG immediately occluded the vasculature upon reaching the device and redirected flow to the two collateral devices. Fluorescent imaging of the embolized device showed deep penetration and thorough occlusion of the entire device with no evidence of blockage or fluorescence in nontarget vascular models (FIG. 26B). These results were reproduced in three independent replications for the test embolization. SELP-ICG was able to effectively deliver ICG deep into the vasculature of a microfluidic model tumor, after successfully occluding flow.

[0281] vii. Cytoxicity of SELP ICG

[0282] ICG cytotoxicity is ameliorated by SELP for HUVECs but not L929 fibroblasts. ICG is clinically used, but delivering a relatively high concentration locally can negatively impact cells. CCK-8 assay was used to assess the relative viability and health of the cells based on the reduction of a tetrazolium salt by dehydrogenase enzymes via electron mediators, such as nicotinamide adenine dinucleotide (NAD). The LD50 for L929 cells was not significantly different for ICG or ICG in SELP, 0.28±0.14 mg/mL and 0.30±0.11 mg/mL, respectively (FIG. 28A). However, the LD50 for ICG and ICG in SELP in HUVEC was very highly significant with respective values of 0.068±0.009 mg/mL and 0.23±0.03 mg/mL (FIG. 28B). In both cases, the addition of SELP either made no difference or ameliorated the toxic effects of ICG. This indicates that ICG incorporation into a hydrogel embolic is potentially feasible from a biocompatibility perspective.

[0283] 4. Discussion

[0284] Achieving effective and efficient surgical resection of hypervascular tumors in the head and neck, such as JNAs, is challenging. Bleeding can rapidly obscure the endoscopic visual field, which increases the risk of surgical complications while reducing optimal surgical outcomes. The delineation of the boundary between malignant and healthy tissues can also be challenging, especially in the sinonasal cavity where margins are extremely difficult to obtain due to the proximity of critical anatomy within millimeters of the tumor. The development of an embolic system that delivers a tumor-selective dye can aid physicians by reducing intraoperative bleeding while demarcating tumor boundaries. While numerous embolic systems and strategies have been explored, no methods have reported the potential synergy between neoadjuvant tumor embolization and fluorescence-based image-guided surgery.

[0285] Effective drug delivery requires the precise delivery of the therapeutic agent with respect to location and time. In the context of fluorescence-based image-guided surgery, this means achieving high visual contrast by a localized dye within the tumor and minimizing dye diffusion to the surrounding healthy tissues. Due to its rapid clearance from the bloodstream (3-5 min. half-life), free ICG has a limited opportunity to accumulate in the tumor vasculature. Incorporation into nanoparticle formulations extends circulation time and can increase accumulation. However, bypassing the circulation phase of ICG accumulation entirely can elevate the local concentration of ICG beyond that which is achievable with freely circulating molecules.

[0286] The tunable biophysical properties of SELP embolics demonstrate promise as delivery vehicles for ICG to tumors. Release over an 18- to 24-hr. period is desirable for current neoadjuvant embolization practices for JNAs, which are typically embolized a day prior to surgery. Highly vascularized tumors have a reported average distance of 300-350 μm between blood vessels, and the vasculature occupies approximately 1% of the total tumor volume [26]. The 24-hr. diffusional distance of ICG released from SELP (FIG. 23) exceeds the intercapillary distances within tumors significantly and should fill the whole tumor volume. The delivery of 0.5 mg/mL of ICG also means that after 24 hrs. of release, the concentration of dye within the tumor will achieve the near-optimal concentration for maximizing fluorescent signal and avoid self-quenching effects (FIG. 24). This ability to concentrate at 24 hrs. is clinically relevant as JNA tumors are typically embolized 24 hrs prior to surgical resection.

[0287] The SELP-ICG embolic formulation has the potential to achieve distinct, fluorescently defined tumor margins that can be identified during fluorescence-based image-guided surgery. ICG has been shown in numerous human trials to preferentially accumulate within various types of solid tumors. These phenomena may be attributed to compromised lymphatic drainage in the malignant tissue, which in turn slows ICG clearance when compared to normal tissues. Delivering higher concentrations of ICG intratumorally via endovascular embolization can potentially further enhance accumulation, as the SELP embolic occludes tumor vessels and prevents ICG clearance by re-entry into tumor vessels. Clearance from the surrounding healthy tissue is unaffected and thus continues to produce a gradient of ICG at the tumor margin.

[0288] The incorporation of ICG into SELP increased gelation kinetics and stiffness of SELP embolics. ICG increased SELP intermolecular interactions as the material underwent phase transition. Polymer-polymer, polymer-solution, and polymer-solute interactions play a role in this behavior. The addition of ICG would increase the osmolarity of the solutions, which has previously been shown to accelerate network formation by increasing the relative favorability of polymer-polymer interactions. However, these observations alone do not explain the degree of enhancement seen in the viscosity profile. The divalent anionic character of ICG likely created bridging interactions between the positively charged lysine residues found within the elastinlike blocks of the SELP polymer backbone. At low temperatures, the polymers were sufficiently soluble that their Brownian motion rendered these interactions transient. As the temperature rose and the solubility of the polymers lessened, the relative strength of the ICG bridging-interaction increased, which led to the observed increase in viscosity.

[0289] Concentration, processing, local environment, and structure are the key features that contribute to the gelation and nano- and microscale formation behaviors of SELP. SELP penetrated into the venous outflow of the model while being rapidly and substantially diluted. The dilution prevented SELP from forming a cohesive network and the resulting soluble polymers were non-occlusive. SELP 815K, as was used in this study, does not gel below 2% (wt/wt) even after 24 hrs at 37° C. SELPs at concentrations below 2% form non-occlusive nanostructures ranging from fibers, spherical nanogels, globular single strand and proteins depending upon environmental conditions. SELP injection at 0.1 mL/min. into the simulated vascular beds, which were perfused at 38 mL/min., represents a 1/380 volumetric dilution. Therefore, the injection under the test conditions represents over a 60× safety margin. This property is similar to that of other clinically used embolic systems, such as LeGoo®, a poly(ethylene glycol)-polyethylene copolymer-based embolic gel, which passes into venous vasculature after producing a transient embolization.

[0290] The deliverability of SELP embolic was not compromised by the addition of ICG. The difference in viscosity was not significant between SELP and SELP-ICG at temperatures <25° C. Increased viscosity at 37° C. did not interfere with the ability of the SELP to perfuse into a clinically-relevant microfluidic model of tumor vasculature during simulated embolization (FIGS. 23 & 25). The SELP-ICG embolic was still also able to produce a thorough occlusion. Notably, the flow resistances in the microfluidic models were lower than that measured in tumor tissues, rendering the devices more difficult to embolize (FIG. 27).

[0291] Fluorescence visualized in tissue phantoms does not necessarily mirror what will be seen in a clinical setting (FIG. 23). Tumor tissues could require higher, or even lower, concentrations of dye to achieve an optimal fluorescent signal. It was also observed that albumin impacted both the release of ICG and the observed intensity of fluorescence (FIG. 23). ICG is known to interact with albumin and other globulins. The addition of albumin thus likely helps shield the negatively charged ICG from interacting with the positively charged lysines in the SELP backbone. Association with albumin also likely helps disperse ICG within the solution, which helps reduce ICG's self-quenching effects (FIG. 23 and FIG. 24). The auto-quenching effect of ICG can likewise complicate imaging as the intensity decreases, rather than increases, if the concentration of ICG is too high. This threshold appeared to be dependent upon factors, such as volume and geometry, which are difficult to control in a biological environment. As such, the optimal concentration of dye within the embolic cannot be determined without further in vivo testing.

[0292] The dual-functional embolization-visualization system, based upon SELP embolics and near IR dye ICG, was developed and characterized for future clinical application in combining embolotherapy with fluorescence-based image-guided surgery. Many of the strategies developed as part of this work could be additionally explored with clinically used materials. Similar to conventional trans-arterial chemoembolization procedures, ICG could be deployed intravascularly and immediately followed by embolization with a particle based-embolic. While this technique would allow for the assessment of ICG with embolotherapy using current clinical materials, the system developed herein offers potential clinical advantages over other materials. Controlled localized release of the fluorescent marker directly from the SELP embolic might enhance tumor demarcation contrast by increasing the intratumoral load, reducing intratumoral clearance, and reducing the amount of dye that enters healthy tissues.

[0293] 5. Conclusions

[0294] ICG incorporation into and release from SELP embolic materials can be used. ICG-polymer interactions increase the viscosity, accelerate gelation, and increase the stiffness of the SELP embolics. ICG is deliverable from SELP over a clinically pertinent time frame. Combining embolization with delivery of a fluorescent dye to hypervascular tumors offers an opportunity to improve surgical visualization by reducing intraoperative bleeding, while simultaneously demarcating tumor margins.

### REFERENCES

[0295] [1] R. S. Bechan, M. E. Sprengers, C. B. Majoie, J. P. Peluso, M. Sluzewski, W. J. Van Rooij, Stent-assisted coil embolization of intracranial aneurysms: Complications in acutely ruptured versus unruptured aneurysms, Am. J. Neuroradiol. 37 (2016) 502-507. https://doi.org/10.3174/ajnr.A4542.
[0296] [2] B. G. Thompson, R. D. Brown, S. Amin-Hanjani, J. P. Broderick, K. M. Cockroft, E. S. Connolly, G. R. Duckwiler, C. C. Harris, V. J. Howard, S. C. C. la. Johnston, P. M. Meyers, A. Molyneux, C. S. Ogilvy, A. J. Ringer, J. Tomer, Guidelines for the Management of Patients With Unruptured Intracranial Aneurysms: A Guideline for Healthcare Professionals From the American Heart Association/American Stroke Association, 2015. https://doi.org/10.1161/STR.0000000000000070.
[0297] [3] J. W. Thompson, O. Elwardany, D. J. McCarthy, D. L. Sheinberg, C. M. Alvarez, A. Nada, B. M. Snelling, S. H. Chen, S. Sur, R. M. Starke, In vivo cerebral aneurysm models, Neurosurg. Focus. 47 (2019) 1-8. https://doi.org/10.3171/2019.4.FOCUS19219.
[0298] [4] N. Chalouhi, M. S. Ali, P. M. Jabbour, S. I. Tjoumakaris, L. F. Gonzalez, R. H. Rosenwasser, W. J. Koch, A. S. Dumont, Biology of intracranial aneurysms: Role of inflammation, J. Cereb. Blood Flow Metab. 32 (2012) 1659-1676. https://doi.org/10.1038/jcbfm.2012.84.
[0299] [5] D. J. Nieuwkamp, L. E. Setz, A. Algra, F. H. Linn, N. K. de Rooij, G. J. Rinkel, Changes in case fatality of aneurysmal subarachnoid haemorrhage over time, according to age, sex, and region: a meta-analysis, Lancet Neurol. 8 (2009) 635-642. https://doi.org/10.1016/S1474-4422(09)70126-7.
[0300] [6] E. S. Connolly, A. A. Rabinstein, J. R. Carhuapoma, C. P. Derdeyn, J. Dion, R. T. Higashida, B. L. Hoh, C. J. Kirkness, A. M. Naidech, C. S. Ogilvy, A. B. Patel, B. G. Thompson, P. Vespa, Guidelines for the management of aneurysmal subarachnoid hemorrhage: A guideline for healthcare professionals from the american heart association/american stroke association, Stroke. 43 (2012) 1711-1737. https://doi.org/10.1161/STR.0b013e3182587839.
[0301] [7] A. Adibi, A. Sen, A. P. Mitha, Cell Therapy for Intracranial Aneurysms: A Review, World Neurosurg. 86 (2016) 390-398. https://doi.org/10.1016/j.wneu.2015.10.082.
[0302] [8] I. Y. Tan, R. F. Agid, R. A. Willinsky, Recanalization rates after endovascular coil embolization in a cohort of matched ruptured and unruptured cerebral aneurysms., Interv. Neuroradiol. 17 (2011) 27-35. https://doi.org/10.1177/159101991101700106.
[0303] [9] Y. Niimi, J. Song, M. Madrid, A. Berenstein, Endosaccular treatment of intracranial aneurysms using matrix coils: Early experience and midterm follow-up, Stroke. 37 (2006) 1028-1032. https://doi.org/10.1161/01.STR.0000206459.73897.a3.
[0304] F. Briganti, G. Leone, M. Marseglia, G. Mariniello, F. Caranci, A. Brunetti, F. Maiuri, Endovascular treatment of cerebral aneurysms using flow-diverter devices: A systematic review, Neuroradiol. J. 28 (2015) 365-375. https://doi.org/10.1177/1971400915602803.
[0305] A. Poursaid, M. M. Jensen, E. Huo, H. Ghandehari, Polymeric materials for embolic and chemoembolic applications, J. Control. Release. 240 (2016) 414-433. https://doi.org/10.1016/j.jconrel.2016.02.033.
[0306] J. Hu, H. Albadawi, B. W. Chong, A. R. Deipolyi, R. A. Sheth, A. Khademhosseini, R. Oklu, Advances in Biomaterials and Technologies for Vascular Embolization, Adv. Mater. 31 (2019) 1-52. https://doi.org/10.1002/adma.201901071.
[0307] R. K. Avery, H. Albadawi, M. Akbari, Y. S. Zhang, M. J. Duggan, D. V. Sahani, B. D. Olsen, A. Khademhosseini, R. Oklu, An injectable shear-thinning biomaterial for endovascular embolization, Sci. Transl. Med. 8 (2016). https://doi.org/10.1126/scitranslmed.aah5533.
[0308] R. Price, A. Poursaid, J. Cappello, H. Ghandehari, Effect of shear on physicochemical properties of matrix metalloproteinase responsive silk-elastinlike hydrogels, J. Control. Release. 195 (2014) 92-98. https://doi.org/10.1016/j.jconrel.2014.07.044.
[0309] R. Dandu, A. Von Cresce, R. Briber, P. Dowell, J. Cappello, H. Ghandehari, Silk-elastinlike protein polymer hydrogels: Influence of monomer sequence on physicochemical properties, Polymer (Guildf). 50 (2009) 366-374. https://doi.org/10.1016/j.polymer.2008.11.047.
[0310] D. Hwang, V. Moolchandani, R. Dandu, M. Haider, J. Cappello, H. Ghandehari, Influence of polymer structure and biodegradation on DNA release from silk-elastinlike protein polymer hydrogels, Int. J. Pharm. 368 (2009) 215-219. https://doi.org/10.1016/j.ijpharm.2008.10.021.
[0311] R. Price, A. Poursaid, H. Ghandehari, Controlled release from recombinant polymers, J. Control. Release. 190 (2014) 304-313. https://doi.org/10.1016/j.jconrel.2014.06.016.
[0312] A. A. Dinerman, J. Cappello, H. Ghandehari, S. W. Hoag, Solute diffusion in genetically engineered silk-elastinlike protein polymer hydrogels, J. Control. Release. 82 (2002) 277-287. https://doi.org/10.1016/50168-3659(02)00134-7.
[0313] A. Poursaid, R. Price, A. Tiede, E. Olson, E. Huo, L. McGill, H. Ghandehari, J. Cappello, In situ gelling silk-elastinlike protein polymer for transarterial chemoembolization, Biomaterials. 57 (2015) 142-152. https://doi.org/10.1016/j.biomaterials.2015.04.015.
[0314] J. A. Gustafson, R. A. Price, K. Greish, J. Cappello, H. Ghandehari, Silk-elastin-like hydrogel improves the safety of adenovirus-mediated gene-directed enzyme-′prodrug therapy, Mol. Pharm. 7 (2010) 1050-1056. https://doi.org/10.1021/mp100161u.
[0315] R. Price, J. Gustafson, K. Greish, J. Cappello, L. McGill, H. Ghandehari, Comparison of silk-elastinlike protein polymer hydrogel and poloxamer in matrix-mediated gene delivery, Int. J. Pharm. 427 (2012) 97-104. https://doi.org/10.1016/j.ijpharm.2011.09.037.
[0316] J. A. Gustafson, R. A. Price, J. Frandsen, C. R. Henak, J. Cappello, H. Ghandehari, Synthesis and characterization of a matrix-metalloproteinase responsive silk-elastinlike protein polymer, Biomacromolecules. 14 (2013) 618-625. https://doi.org/10.1021/bm3013692.
[0317] J. Goode, Use of International Standard ISO 10993-1, “Biological evaluation of medical devices—Part 1: Evaluation and testing within a risk management process,” Dep. Heal. Hum. Serv. Food Drug Adm. (2016) 68. https://doi.org/http://www.fda.gov/downloads/medicaldevices/deviceregulationandguidance/guidancedocuments/ucm348890.pdf.
[0318] K. J. Isaacson, M. M. Jensen, D. B. Steinhauff, J. E. Kirklow, R. Mohammadpour, J. W. Grunberger, J. Cappello, H. Ghandehari, Location of Stimuli-Responsive Peptide Sequences within Silk-Elastinlike Protein-Based Polymers Affects Nanostructure Assembly and Drug-Polymer Interactions, J. Drug Target. 0 (2020) 1-47. https://doi.org/10.1080/1061186x.2020.1757099.
[0319] T. A. Altes, H. J. Cloft, J. G. Short, A. Degast, H. M. Do, G. A. Helm, D. F. Kallmes, Creation of saccular aneurysms in the rabbit: A model suitable for testing endovascular devices, Am. J. Roentgenol. 174 (2000) 349-354. https://doi.org/10.2214/ajr.174.2.1740349.
[0320] E. A. Ryan, L. F. Mockros, J. W. Weisel, L. Lorand, Structural origins of fibrin clot rheology, Biophys. J. 77 (1999) 2813-2826. https://doi.org/10.1016/S0006-3495(99)77113-4.
[0321] E. A. Ryan, L. F. Mockros, A. M. Stern, L. Lorand, Influence of a natural and a synthetic inhibitor of factor XIIIa on fibrin clot rheology, Biophys. J. 77 (1999) 2827-2836. https://doi.org/10.1016/S0006-3495(99)77114-6.
[0322] C. Yan, D. J. Pochan, Rheological properties of peptide-based hydrogels for biomedical and other applications, Chem. Soc. Rev. 39 (2010) 3528-3540. https://doi.org/10.1039/b919449p.
[0323] J. Gustafson, K. Greish, J. Frandsen, J. Cappello, H. Ghandehari, Silk-elastinlike recombinant polymers for gene therapy of head and neck cancer: From molecular definition to controlled gene expression, J. Control. Release. 140 (2009) 256-261. https://doi.org/10.1016/j.jconrel.2009.05.022.
[0324] J. L. Frandsen, H. Ghandehari, Recombinant protein-based polymers for advanced drug delivery, Chem. Soc. Rev. 41 (2012) 2696-2706. https://doi.org/10.1039/c2cs15303c.
[0325] M. H. Chen, Critical reviews in oral biology & medicine: Update on dental nanocomposites, J. Dent. Res. 89 (2010) 549-560. https://doi.org/10.1177/0022034510363765.
[0326] L. Feng, B. I. Suh, A. C. Shortall, Formation of gaps at the filler-resin interface induced by polymerization contraction stress. Gaps at the interface, Dent. Mater. 26 (2010) 719-729. https://doi.org/10.1016/j.dental.2010.03.004.
[0327] E. R. Stedronsky, J. Cappello, United States Patent (19) 11 U.S. Pat. No. 5,348,136, 1993.
[0328] U. Berlemann, O. Schwarzenbach, An injectable nucleus replacement as an adjunct to microdiscectomy: 2 year follow-up in a pilot clinical study, Eur. Spine J. 18 (2009) 1706-1712. https://doi.org/10.1007/s00586-009-1136-0.
[0329] K. J. Isaacson, M. M. Jensen, A. H. Watanabe, B. E. Green, M. A. Correa, J. Cappello, H. Ghandehari, Self-Assembly of Thermoresponsive Recombinant Silk-Elastinlike Nanogels, Macromol. Biosci. 18 (2018) 1-11. https://doi.org/10.1002/mabi.201700192.
[0330] J. N. Rodriguez, W. Hwang, J. Horn, T. L. Landsman, A. Boyle, M. A. Wierzbicki, S. M. Hasan, D. Follmer, J. Bryant, W. Small, D. J. Maitland, Design and biocompatibility of endovascular aneurysm filling devices, J. Biomed. Mater. Res.-Part A. 103 (2015) 1577-1594. https://doi.org/10.1002/jbm.a.35271.
[0331] S. O. Oktar, C. Yücel, D. Karaosmanoglu, K. Akkan, H. Ozdemir, N. Tokgoz, T. Tali, Blood-flow volume quantification in internal carotid and vertebral arteries: comparison of 3 different ultrasound techniques with phase-contrast MR imaging., AJNR. Am. J. Neuroradiol. 27 (2006) 363-9. http://www.ncbi.nlm.nih.gov/pubmed/16484412 (accessed May 7, 2018).
[0332] S. Juvela, Prevalence of and risk factors for intracranial aneurysms, Lancet. Neurol. 10 (2011) 595-597. doi:10.1016/S1474-4422(11)70125-9.
[0333] [1] Z. Liu, D. Wang, X. Sun, J. Wang, L. Hu, H. Li, P. Dai, The site of origin and expansive routes of juvenile nasopharyngeal angiofibroma (JNA), Int. J. Pediatr. Otorhinolaryngol. 75 (2011) 1088-1092. doi:10.1016/j.ijporl.2011.05.020.
[0334] [2] A. Christensen, K. Juhl, M. Persson, B. W. Charabi, J. Mortensen, K. Kiss, G. Lelkaitis, N. Rubek, C. von Buchwald, A. Kær, uPAR-targeted optical near-infrared (NIR) fluorescence imaging and PET for image-guided surgery in head and neck cancer: proof-of-concept in orthotopic xenograft model., Oncotarget. 8 (2017) 15407-15419. doi:10.18632/oncotarget.14282.
[0335] [3] P. S. Low, S. Singhal, M. Srinivasarao, Fluorescence-guided surgery of cancer: applications, tools and perspectives, Curr. Opin. Chem. Biol. 45 (2018) 64-72. doi:10.1016/J.CBPA.2018.03.002.
[0336] [4] N. Zhu, S. Mondal, S. Gao, S. Achilefua, V. Gruev, R. Liang, Dual-mode optical imaging system for fluorescence image-guided surgery., Opt. Lett. 39 (2014) 3830-2. doi:10.1364/OL.39.003830.
[0337] [5] E. J. Duffis, C. D. Gandhi, C. J. Prestigiacomo, T. Abruzzo, F. Albuquerque, K. R. Bulsara, C. P. Derdeyn, J. F. Fraser, J. A. Hirsch, M. S. Hussain, H. M. Do, M. V Jayaraman, P. M. Meyers, S. Narayanan, Society for Neurointerventional Surgery, Head, neck, and brain tumor embolization guidelines., J. Neurointerv. Surg. 4 (2012) 251-5. doi:10.1136/neurintsurg-2012-010350.
[0338] [6] R. Gupta, A. J. Thomas, M. Horowitz, Intracranial head and neck tumors: endovascular considerations, present and future, Neurosurgery. 59 (2006) S3-251-S3-260. doi:10.1227/01.NEU.0000239249.65742.1C.
[0339] [7] A. Poursaid, M. M. Jensen, E. Huo, H. Ghandehari, Polymeric materials for embolic and chemoembolic applications, J. Control. Release. 240 (2016). doi:10.1016/j.jconrel.2016.02.033.
[0340] [8] J. Mérian, J. Gravier, F. Navarro, I. Texier, Fluorescent nanoprobes dedicated to in vivo imaging: from preclinical validations to clinical translation, Molecules. 17 (2012) 5564-5591. doi:10.3390/molecules17055564.
[0341] [9] J. Hu, H. Albadawi, B. W. Chong, A. R. Deipolyi, R. A. Sheth, A. Khademhosseini, R. Oklu, Advances in biomaterials and technologies for vascular embolization, Adv. Mater. 31 (2019) 1901071. doi:10.1002/adma.201901071.
[0342] [10] J. Y. W. Chan, R. K. Y. Tsang, S. T. S. Wong, W. I. Wei, Indocyanine green fluorescence mapping of sentinel lymph node in patients with recurrent nasopharyngeal carcinoma after previous radiotherapy., Head Neck. 37 (2015) E169-73. doi:10.1002/hed.24052.
[0343] [11] H. Maeda, H. Nakamura, J. Fang, The EPR effect for macromolecular drug delivery to solid tumors: improvement of tumor uptake, lowering of systemic toxicity, and distinct tumor imaging in vivo, Adv. Drug Deliv. Rev. 65 (2013) 71-79. doi:10.1016/J.ADDR.2012.10.002.
[0344] [12] J. T. Alander, I. Kaartinen, A. Laakso, T. Panla, T. Spillmann, V. V. Tuchin, M. Venermo, P. Valisuo, A review of indocyanine green fluorescent imaging in surgery, Int. J. Biomed. Imaging. 2012 (2012) 1-26. doi:10.1155/2012/940585.
[0345] [13] R. P. Judy, J. J. Keating, E. M. DeJesus, J. X. Jiang, O. T. Okusanya, S. Nie, D. E. Holt, S. P. Arlauckas, P. S. Low, E. J. Delikatny, S. Singhal, Quantification of tumor fluorescence during intraoperative optical cancer imaging, Sci. Rep. 5 (2015) 16208. doi:10.1038/srep16208.
[0346] [14] R. Dandu, A. Von Cresce, R. Briber, P. Dowell, J. Cappello, H. Ghandehari, Silk-elastinlike protein polymer hydrogels: influence of monomer sequence on physicochemical properties, Polymer (Guildf). 50 (2009) 366-374. doi:10.1016/j.polymer.2008.11.047.
[0347] [15] W. Teng, J. Cappello, X. Wu, Recombinant silk-elastinlike protein polymer displays elasticity comparable to elastin, Biomacromolecules. 10 (2009) 3028-3036. doi:10.1021/bm900651 g.
[0348] [16] A. Poursaid, R. Price, A. Tiede, E. Olson, E. Huo, L. McGill, H. Ghandehari, J. Cappello, In situ gelling silk-elastinlike protein polymer for transarterial chemoembolization, Biomaterials. 57 (2015) 142-152. doi:10.1016/j.biomaterials.2015.04.015.
[0349] [17] A. Poursaid, M. M. Jensen, I. Nourbakhsh, M. Weisenberger, J. W. Hellgeth, S. Sampath, J. Cappello, H. Ghandehari, J. Cappello, Silk-elastinlike protein polymer liquid chemoembolic for localized release of doxorubicin and sorafenib, Mol. Pharm. 13 (2016) 2736-2748. doi:10.1021/acs.molpharmaceut.6b00325.
[0350] [18] J. A. Gustafson, R. A. Price, J. Frandsen, C. R. Henak, J. Cappello, H. Ghandehari, Synthesis and characterization of a matrix-metalloproteinase responsive silk-elastinlike protein polymer, Biomacromolecules. 14 (2013) 618-625. doi:10.1021/bm3013692.
[0351] [19] A. A. Dinerman, J. Cappello, H. Ghandehari, S. W. Hoag, Swelling behavior of a genetically engineered silk-elastinlike protein polymer hydrogel, Biomaterials. 23 (2002) 4203-4210.
[0352] [20] M. M. Jensen, W. Jia, K. J. Isaacson, A. Schults, J. Cappello, G. D. Prestwich, S. Oottamasathien, H. Ghandehari, Silk-elastinlike protein polymers enhance the efficacy of a therapeutic glycosaminoglycan for prophylactic treatment of radiation-induced proctitis, J. Control. Release. 263 (2017) 46-56. doi:10.1016/j.jconrel.2017.02.025.
[0353] [21] R. W. Korsmeyer, R. Gurny, E. Doelker, P. Buri, N. A. Peppas, Mechanisms of solute release from porous hydrophilic polymers, Int. J. Pharm. 15 (1983) 25-35. doi:10.1016/0378-5173(83)90064-9.
[0354] [22] Z. G. Portakal, S. Shermer, C. Jenkins, E. Spezi, T. Perrett, N. Tuncel, J. Phillips, Design and characterisation of tissue-mimicking gel phantoms for diffusion kurtosis imaging, Med. Phys. (2018). doi:10.1002/mp.12907.
[0355] [23] P. Gaehtgens, H. J. Meiselman, H. Wayland, Erythrocyte flow velocities in mesenteric microvessels of the cat, Microvasc. Res. 2 (1970) 151-162. doi:10.1016/0026-2862(70)90003-8.
[0356] [24] J. A. Carr, D. Franke, J. R. Caram, C. F. Perkinson, M. Saif, V. Askoxylakis, M. Datta, D. Fukumura, R. K. Jain, M. G. Bawendi, O. T. Bruns, Shortwave infrared fluorescence imaging with the clinically approved near-infrared dye indocyanine green, Proc. Natl. Acad. Sci. 115 (2018) 4465-4470. doi:10.1073/pnas.1718917115.
[0357] [25] H. Wang, X. Li, B. W.-C. Tse, H. Yang, C. A. Thorling, Y. Liu, M. Touraud, J. B. Chouane, X. Liu, M. S. Roberts, X. Liang, Indocyanine green-incorporating nanoparticles for cancer theranostics., Theranostics. 8 (2018) 1227-1242. doi:10.7150/thno.22872.
[0358] [26] H. K. Awwad, M. el Naggar, N. Mocktar, M. Barsoum, Intercapillary distance measurement as an indicator of hypoxia in carcinoma of the cervix uteri., Int. J. Radiat. Oncol. Biol. Phys. 12 (1986) 1329-33. doi:10.1016/0360-3016(86)90165-3.
[0359] [27] S. Luo, E. Zhang, Y. Su, T. Cheng, C. Shi, A review of NIR dyes in cancer targeting and imaging, Biomaterials. 32 (2011) 7127-7138. doi:10.1016/J.BIOMATERIALS.2011.06.024.
[0360] [28] M. Behbahaninia, N. L. Martirosyan, J. Georges, J. A. Udovich, M. Y. S. Kalani, B. G. Feuerstein, P. Nakaji, R. F. Spetzler, M. C. Preul, Intraoperative fluorescent imaging of intracranial tumors: a review, Clin. Neurol. Neurosurg. 115 (2013) 517-528. doi:10.1016/J.CLINEURO.2013.02.019.
[0361] [29] K. J. Isaacson, M. M. Jensen, A. H. Watanabe, B. E. Green, M. A. Correa, J. Cappello, H. Ghandehari, Self-assembly of thermoresponsive recombinant silk-elastinlike nanogels, Macromol. Biosci. 18 (2018) 1-11. doi:10.1002/mabi.201700192.
[0362] [30] J. Cappello, J. W. Crissman, M. Crissman, F. A. Ferrari, G. Textor, O. Wallis, J. R. Whitledge, X. Zhou, D. Burman, L. Aukerman, E. R. Stedronsky, In-situ self-assembling protein polymer gel systems for administration, delivery, and release of drugs, J. Control. Release. 53 (1998) 105-117. doi:10.1016/S0168-3659(97)00243-5.
[0363] [31] R. Price, A. Poursaid, J. Cappello, H. Ghandehari, Effect of shear on physicochemical properties of matrix metalloproteinase responsive silk-elastinlike hydrogels, J. Control. Release. 195 (2014) 92-98. doi:10.1016/j.jconrel.2014.07.044.
[0364] [32] R. Dandu, H. Ghandehari, J. Cappello, Characterization of structurally related adenovirus-laden silk-elastinlike hydrogels, J. Bioact. Compat. Polym. 23 (2008) 5-19. doi:10.1177/0883911507085278.
[0365] [33] S.-H. H. Jung, J.-W. W. Choi, C.-O. O. Yun, S. H. Kim, I. C. Kwon, H. Ghandehari, Direct observation of interactions of silk-elastinlike protein polymer with adenoviruses and elastase, Mol. Pharm. 12 (2015) 1673-1679. doi:10.1021/acs.molpharmaceut.5b00075.
[0366] [34] E. M. Sevick, R. K. Jain, Geometric resistance to blood flow in solid tumors perfused ex vivo: effects of tumor size and perfusion pressure., Cancer Res. 49 (1989) 3506-12. http://www.ncbi.nlm.nih.gov/pubmed/2731172 (accessed Jul. 2, 2019).
[0367] [35] T. Ishizawa, N. Fukushima, J. Shibahara, K. Masuda, S. Tamura, T. Aoki, K. Hasegawa, Y. Beck, M. Fukayama, N. Kokudo, Real-time identification of liver cancers by using indocyanine green fluorescent imaging, Cancer. 115 (2009) 2491-2504. doi:10.1002/cncr.24291.
[0368] [36] M. Varela, M. I. Real, M. Burrel, A. Forner, M. Sala, M. Brunet, C. Ayuso, L. Castells, X. Montañá, J. M. Llovet, Chemoembolization of hepatocellular carcinoma with drug eluting beads: efficacy and doxorubicin pharmacokinetics, J. Hepatol. 46 (2007) 474-481.

1. A method of treating an aneurysm in a subject comprising administering to the subject a therapeutically effective amount of a composition comprising a silk-elastinlike protein polymer (SELP).

2. The method of claim 1, wherein the aneurysm is a saccular aneurysm.

3. The method of claim 2, wherein the saccular aneurysm is a cerebral aneurysm (CA).

4. The method of claim 1, wherein the subject has been diagnosed with an aneurysm.

5. The method of claim 1, wherein the SELP embolizes the aneurysm.

6. The method of claim 1, wherein the SELP comprises the sequence of [GAGS(GAGAGS)ₙ₁(GVGVP)ₙ₂GXGVP(GVGVP)ₙ₃(GAGAGS)ₙ₄GA]ₙ₅GA, wherein X can be any amino acid, wherein n1 can be 2-10, wherein n2 can be 1-50, wherein n3 can be 1-50, wherein n4 can be 2-10, wherein n5 can be 1-14.

7. The method of claim 1, wherein the SELP comprises the sequence of [GAGS(GAGAGS)₂(GVGVP)₄GKGVP(GVGVP)₁₁(GAGAGS)₅GA]₆GA

8. The method of claim 1, wherein the SELP comprises the sequence of MDPVVLQRRDWENPGVTQLNRLAAHPPFASDPM[GAGS(GAGAGS)₂(GVGVP)₄G KGVP(GVGVP)₁₁(GAGAGS)₅GA]₆GAMDPGRYQDLRSHHHHHH

9. The method of claim 1, wherein the SELP transitions from a liquid to a hydrogel at temperatures above 23° C.

10. The method of claim 1, wherein the therapeutically effective amount is at least 1×, 2×, 3×, or 4× the aneurysm volume.

11. (canceled)

12. (canceled)

13. (canceled)

14. The method of claim 1, wherein the composition is administered using a catheter.

15. The method of claim 1, wherein the aneurysm comprises an aneurysmal sac, wherein the composition is administered into or enters the aneurysmal sac.

16. The method of claim 1, wherein no distal embolisms are present.

17. The method of claim 1, wherein the SELP remains in the aneurysm for one month.

18. The method of claim 1, wherein the composition further comprises a pharmaceutically acceptable carrier.

19. The method of claim 1, wherein the composition further comprises a contrast agent.

20. (canceled)

21. The method of claim 1, wherein the composition further comprises a visualization agent.

22. (canceled)

23. The method of claim 1, wherein the composition further comprises a therapeutic agent.

24. (canceled)

25. A method of preventing rupture of an aneurysm comprising administering to a subject having an aneurysm a composition comprising a SELP, wherein the SELP is present in the aneurysm and prevents rupture.

26.-48. (canceled)

49. A method of treating arterial venous malformations (AVM) in a subject comprising administering to the subject a composition comprising a SELP, wherein the SELP embolizes an abnormal blood vessel in the AVM.

50.-121. (canceled)

The application's sequence listing, which the Patent Office published only in electronic form, follows.

SEQUENCE LISTING (25 sequences)

SEQ ID NO: 1 - protein, 6 aa, Artificial Sequence
  synthetic construct; silk-elastinlike protein
GAGAGS

SEQ ID NO: 2 - protein, 5 aa, Artificial Sequence
  synthetic construct; silk-elastinlike protein
GVGVP

SEQ ID NO: 3 - protein, 936 aa, Artificial Sequence
  synthetic construct; silk-elastinlike protein
VPGVGVPGVGVPGVGVPGVGVPGVGVPGVGVPGVGVPGVGGAGAGSGAGAGSVPGVGVPGVGVPGVGVPGVGVPGVGVPGVGVPGVGVPGVGGAGAGSGAGAGSVPGVGVPGVGVPGVGVPGVGVPGVGVPGVGVPGVGVPGVGGAGAGSGAGAGSVPGVGVPGVGVPGVGVPGVGVPGVGVPGVGVPGVGVPGVGGAGAGSGAGAGSVPGVGVPGVGVPGVGVPGVGVPGVGVPGVGVPGVGVPGVGGAGAGSGAGAGSVPGVGVPGVGVPGVGVPGVGVPGVGVPGVGVPGVGVPGVGGAGAGSGAGAGSVPGVGVPGVGVPGVGVPGVGVPGVGVPGVGVPGVGVPGVGGAGAGSGAGAGSVPGVGVPGVGVPGVGVPGVGVPGVGVPGVGVPGVGVPGVGGAGAGSGAGAGSVPGVGVPGVGVPGVGVPGVGVPGVGVPGVGVPGVGVPGVGGAGAGSGAGAGSVPGVGVPGVGVPGVGVPGVGVPGVGVPGVGVPGVGVPGVGGAGAGSGAGAGSVPGVGVPGVGVPGVGVPGVGVPGVGVPGVGVPGVGVPGVGGAGAGSGAGAGSVPGVGVPGVGVPGVGVPGVGVPGVGVPGVGVPGVGVPGVGGAGAGSGAGAGSVPGVGVPGVGVPGVGVPGVGVPGVGVPGVGVPGVGVPGVGGAGAGSGAGAGSVPGVGVPGVGVPGVGVPGVGVPGVGVPGVGVPGVGVPGVGGAGAGSGAGAGSVPGVGVPGVGVPGVGVPGVGVPGVGVPGVGVPGVGVPGVGGAGAGSGAGAGSVPGVGVPGVGVPGVGVPGVGVPGVGVPGVGVPGVGVPGVGGAGAGSGAGAGSVPGVGVPGVGVPGVGVPGVGVPGVGVPGVGVPGVGVPGVGGAGAGSGAGAGSVPGVGVPGVGVPGVGVPGVGVPGVGVPGVGVPGVGVPGVGGAGAGSGAGAGS

SEQ ID NO: 4 - protein, 962 aa, Artificial Sequence
  synthetic construct; silk-elastinlike protein
GVGVPGVGVPGVGVPGVGVPGAGAGSGAGAGSGAGAGSGAGAGSGAGAGSGAGAGSGAGAGSGAGAGSGAGAGSGVGVPGVGVPGVGVPGVGVPGAGAGSGAGAGSGAGAGSGAGAGSGAGAGSGAGAGSGAGAGSGAGAGSGAGAGSGVGVPGVGVPGVGVPGVGVPGAGAGSGAGAGSGAGAGSGAGAGSGAGAGSGAGAGSGAGAGSGAGAGSGAGAGSGVGVPGVGVPGVGVPGVGVPGAGAGSGAGAGSGAGAGSGAGAGSGAGAGSGAGAGSGAGAGSGAGAGSGAGAGSGVGVPGVGVPGVGVPGVGVPGAGAGSGAGAGSGAGAGSGAGAGSGAGAGSGAGAGSGAGAGSGAGAGSGAGAGSGVGVPGVGVPGVGVPGVGVPGAGAGSGAGAGSGAGAGSGAGAGSGAGAGSGAGAGSGAGAGSGAGAGSGAGAGSGVGVPGVGVPGVGVPGVGVPGAGAGSGAGAGSGAGAGSGAGAGSGAGAGSGAGAGSGAGAGSGAGAGSGAGAGSGVGVPGVGVPGVGVPGVGVPGAGAGSGAGAGSGAGAGSGAGAGSGAGAGSGAGAGSGAGAGSGAGAGSGAGAGSGVGVPGVGVPGVGVPGVGVPGAGAGSGAGAGSGAGAGSGAGAGSGAGAGSGAGAGSGAGAGSGAGAGSGAGAGSGVGVPGVGVPGVGVPGVGVPGAGAGSGAGAGSGAGAGSGAGAGSGAGAGSGAGAGSGAGAGSGAGAGSGAGAGSGVGVPGVGVPGVGVPGVGVPGAGAGSGAGAGSGAGAGSGAGAGSGAGAGSGAGAGSGAGAGSGAGAGSGAGAGSGVGVPGVGVPGVGVPGVGVPGAGAGSGAGAGSGAGAGSGAGAGSGAGAGSGAGAGSGAGAGSGAGAGSGAGAGSGVGVPGVGVPGVGVPGVGVPGAGAGSGAGAGSGAGAGSGAGAGSGAGAGSGAGAGSGAGAGSGAGAGSGAGAGS

SEQ ID NO: 5 - protein, 768 aa, Artificial Sequence
  synthetic construct; SELP peptide
VPGVGVPGVGVPGVGVPGVGVPGVGVPGVGVPGVGVPGVGGAGAGSGAGAGSGAGAGSGAGAGSVPGVGVPGVGVPGVGVPGVGVPGVGVPGVGVPGVGVPGVGGAGAGSGAGAGSGAGAGSGAGAGSVPGVGVPGVGVPGVGVPGVGVPGVGVPGVGVPGVGVPGVGGAGAGSGAGAGSGAGAGSGAGAGSVPGVGVPGVGVPGVGVPGVGVPGVGVPGVGVPGVGVPGVGGAGAGSGAGAGSGAGAGSGAGAGSVPGVGVPGVGVPGVGVPGVGVPGVGVPGVGVPGVGVPGVGGAGAGSGAGAGSGAGAGSGAGAGSVPGVGVPGVGVPGVGVPGVGVPGVGVPGVGVPGVGVPGVGGAGAGSGAGAGSGAGAGSGAGAGSVPGVGVPGVGVPGVGVPGVGVPGVGVPGVGVPGVGVPGVGGAGAGSGAGAGSGAGAGSGAGAGSVPGVGVPGVGVPGVGVPGVGVPGVGVPGVGVPGVGVPGVGGAGAGSGAGAGSGAGAGSGAGAGSVPGVGVPGVGVPGVGVPGVGVPGVGVPGVGVPGVGVPGVGGAGAGSGAGAGSGAGAGSGAGAGSVPGVGVPGVGVPGVGVPGVGVPGVGVPGVGVPGVGVPGVGGAGAGSGAGAGSGAGAGSGAGAGSVPGVGVPGVGVPGVGVPGVGVPGVGVPGVGVPGVGVPGVGGAGAGSGAGAGSGAGAGSGAGAGSVPGVGVPGVGVPGVGVPGVGVPGVGVPGVGVPGVGVPGVGGAGAGSGAGAGSGAGAGSGAGAGS

SEQ ID NO: 6 - protein, 912 aa, Artificial Sequence
  synthetic construct; SELP peptide
VPGVGVPGVGVPGVGVPGVGVPGVGVPGVGVPGVGVPGVGGAGAGSGAGAGSGAGAGSGAGAGSGAGAGSGAGAGSVPGVGVPGVGVPGVGVPGVGVPGVGVPGVGVPGVGVPGVGGAGAGSGAGAGSGAGAGSGAGAGSGAGAGSGAGAGSVPGVGVPGVGVPGVGVPGVGVPGVGVPGVGVPGVGVPGVGGAGAGSGAGAGSGAGAGSGAGAGSGAGAGSGAGAGSVPGVGVPGVGVPGVGVPGVGVPGVGVPGVGVPGVGVPGVGGAGAGSGAGAGSGAGAGSGAGAGSGAGAGSGAGAGSVPGVGVPGVGVPGVGVPGVGVPGVGVPGVGVPGVGVPGVGGAGAGSGAGAGSGAGAGSGAGAGSGAGAGSGAGAGSVPGVGVPGVGVPGVGVPGVGVPGVGVPGVGVPGVGVPGVGGAGAGSGAGAGSGAGAGSGAGAGSGAGAGSGAGAGSVPGVGVPGVGVPGVGVPGVGVPGVGVPGVGVPGVGVPGVGGAGAGSGAGAGSGAGAGSGAGAGSGAGAGSGAGAGSVPGVGVPGVGVPGVGVPGVGVPGVGVPGVGVPGVGVPGVGGAGAGSGAGAGSGAGAGSGAGAGSGAGAGSGAGAGSVPGVGVPGVGVPGVGVPGVGVPGVGVPGVGVPGVGVPGVGGAGAGSGAGAGSGAGAGSGAGAGSGAGAGSGAGAGSVPGVGVPGVGVPGVGVPGVGVPGVGVPGVGVPGVGVPGVGGAGAGSGAGAGSGAGAGSGAGAGSGAGAGSGAGAGSVPGVGVPGVGVPGVGVPGVGVPGVGVPGVGVPGVGVPGVGGAGAGSGAGAGSGAGAGSGAGAGSGAGAGSGAGAGSVPGVGVPGVGVPGVGVPGVGVPGVGVPGVGVPGVGVPGVGGAGAGSGAGAGSGAGAGSGAGAGSGAGAGSGAGAGS

SEQ ID NO: 7 - protein, 968 aa, Artificial Sequence
  synthetic construct; SELP peptide
VPGVGVPGVGVPGVGVPGVGVPGVGVPGVGVPGVGVPGVGGAGAGSGAGAGSGAGAGSGAGAGSGAGAGSGAGAGSGAGAGSGAGAGSVPGVGVPGVGVPGVGVPGVGVPGVGVPGVGVPGVGVPGVGGAGAGSGAGAGSGAGAGSGAGAGSGAGAGSGAGAGSGAGAGSGAGAGSVPGVGVPGVGVPGVGVPGVGVPGVGVPGVGVPGVGVPGVGGAGAGSGAGAGSGAGAGSGAGAGSGAGAGSGAGAGSGAGAGSGAGAGSVPGVGVPGVGVPGVGVPGVGVPGVGVPGVGVPGVGVPGVGGAGAGSGAGAGSGAGAGSGAGAGSGAGAGSGAGAGSGAGAGSGAGAGSVPGVGVPGVGVPGVGVPGVGVPGVGVPGVGVPGVGVPGVGGAGAGSGAGAGSGAGAGSGAGAGSGAGAGSGAGAGSGAGAGSGAGAGSVPGVGVPGVGVPGVGVPGVGVPGVGVPGVGVPGVGVPGVGGAGAGSGAGAGSGAGAGSGAGAGSGAGAGSGAGAGSGAGAGSGAGAGSVPGVGVPGVGVPGVGVPGVGVPGVGVPGVGVPGVGVPGVGGAGAGSGAGAGSGAGAGSGAGAGSGAGAGSGAGAGSGAGAGSGAGAGSVPGVGVPGVGVPGVGVPGVGVPGVGVPGVGVPGVGVPGVGGAGAGSGAGAGSGAGAGSGAGAGSGAGAGSGAGAGSGAGAGSGAGAGSVPGVGVPGVGVPGVGVPGVGVPGVGVPGVGVPGVGVPGVGGAGAGSGAGAGSGAGAGSGAGAGSGAGAGSGAGAGSGAGAGSGAGAGSVPGVGVPGVGVPGVGVPGVGVPGVGVPGVGVPGVGVPGVGGAGAGSGAGAGSGAGAGSGAGAGSGAGAGSGAGAGSGAGAGSGAGAGSVPGVGVPGVGVPGVGVPGVGVPGVGVPGVGVPGVGVPGVGGAGAGSGAGAGSGAGAGSGAGAGSGAGAGSGAGAGSGAGAGSGAGAGS

SEQ ID NO: 8 - protein, 864 aa, Artificial Sequence
  synthetic construct; SELP peptide
VPGVGVPGVGVPGVGVPGVGVPGVGVPGVGVPGVGVPGVGVPGVGVPGVGVPGVGVPGVGGAGAGSGAGAGSGAGAGSGAGAGSGAGAGSGAGAGSGAGAGSGAGAGSVPGVGVPGVGVPGVGVPGVGVPGVGVPGVGVPGVGVPGVGVPGVGVPGVGVPGVGVPGVGGAGAGSGAGAGSGAGAGSGAGAGSGAGAGSGAGAGSGAGAGSGAGAGSVPGVGVPGVGVPGVGVPGVGVPGVGVPGVGVPGVGVPGVGVPGVGVPGVGVPGVGVPGVGGAGAGSGAGAGSGAGAGSGAGAGSGAGAGSGAGAGSGAGAGSGAGAGSVPGVGVPGVGVPGVGVPGVGVPGVGVPGVGVPGVGVPGVGVPGVGVPGVGVPGVGVPGVGGAGAGSGAGAGSGAGAGSGAGAGSGAGAGSGAGAGSGAGAGSGAGAGSVPGVGVPGVGVPGVGVPGVGVPGVGVPGVGVPGVGVPGVGVPGVGVPGVGVPGVGVPGVGGAGAGSGAGAGSGAGAGSGAGAGSGAGAGSGAGAGSGAGAGSGAGAGSVPGVGVPGVGVPGVGVPGVGVPGVGVPGVGVPGVGVPGVGVPGVGVPGVGVPGVGVPGVGGAGAGSGAGAGSGAGAGSGAGAGSGAGAGSGAGAGSGAGAGSGAGAGSVPGVGVPGVGVPGVGVPGVGVPGVGVPGVGVPGVGVPGVGVPGVGVPGVGVPGVGVPGVGGAGAGSGAGAGSGAGAGSGAGAGSGAGAGSGAGAGSGAGAGSGAGAGSVPGVGVPGVGVPGVGVPGVGVPGVGVPGVGVPGVGVPGVGVPGVGVPGVGVPGVGVPGVGGAGAGSGAGAGSGAGAGSGAGAGSGAGAGSGAGAGSGAGAGSGAGAGS

SEQ ID NO: 9 - protein, 1040 aa, Artificial Sequence
  synthetic construct; SELP peptide
VPGVGVPGVGVPGVGVPGVGVPGVGVPGVGVPGVGVPGVGVPGVGVPGVGVPGVGVPGVGVPGVGVPGVGVPGVGVPGVGVPGVGVPGVGVPGVGVPGVGVPGVGVPGVGVPGVGVPGVGVPGVGVPGVGVPGVGVPGVGVPGVGVPGVGVPGVGVPGVGGAGAGSGAGAGSGAGAGSGAGAGSGAGAGSGAGAGSGAGAGSGAGAGSVPGVGVPGVGVPGVGVPGVGVPGVGVPGVGVPGVGVPGVGVPGVGVPGVGVPGVGVPGVGVPGVGVPGVGVPGVGVPGVGVPGVGVPGVGVPGVGVPGVGVPGVGVPGVGVPGVGVPGVGVPGVGVPGVGVPGVGVPGVGVPGVGVPGVGVPGVGVPGVGGAGAGSGAGAGSGAGAGSGAGAGSGAGAGSGAGAGSGAGAGSGAGAGSVPGVGVPGVGVPGVGVPGVGVPGVGVPGVGVPGVGVPGVGVPGVGVPGVGVPGVGVPGVGVPGVGVPGVGVPGVGVPGVGVPGVGVPGVGVPGVGVPGVGVPGVGVPGVGVPGVGVPGVGVPGVGVPGVGVPGVGVPGVGVPGVGVPGVGVPGVGVPGVGGAGAGSGAGAGSGAGAGSGAGAGSGAGAGSGAGAGSGAGAGSGAGAGSVPGVGVPGVGVPGVGVPGVGVPGVGVPGVGVPGVGVPGVGVPGVGVPGVGVPGVGVPGVGVPGVGVPGVGVPGVGVPGVGVPGVGVPGVGVPGVGVPGVGVPGVGVPGVGVPGVGVPGVGVPGVGVPGVGVPGVGVPGVGVPGVGVPGVGVPGVGVPGVGGAGAGSGAGAGSGAGAGSGAGAGSGAGAGSGAGAGSGAGAGSGAGAGSVPGVGVPGVGVPGVGVPGVGVPGVGVPGVGVPGVGVPGVGVPGVGVPGVGVPGVGVPGVGVPGVGVPGVGVPGVGVPGVGVPGVGVPGVGVPGVGVPGVGVPGVGVPGVGVPGVGVPGVGVPGVGVPGVGVPGVGVPGVGVPGVGVPGVGVPGVGVPGVGGAGAGSGAGAGSGAGAGSGAGAGSGAGAGSGAGAGSGAGAGSGAGAGS

SEQ ID NO: 10 - protein, 1002 aa, Artificial Sequence
  synthetic construct; SELP peptide
GAGAGSGAGAGSGAGAGSGAGAGSGAGAGSGAGAGSGAGAGSGAGAGSGAGAGSGAGAGSGAGAGSGAGAGSGAAVTGRGDSPASAAGYGAGAGSGAGAGSGAGAGSGAGAGSGAGAGSGVGVGPGVGVGPGVGVGPGVGVGPGVGVGPGVGVGPGVGVGPGVGVGPGAGAGSGAGAGSGAGAGSGAGAGSGAGAGSGAGAGSGAGAGSGAGAGSGAGAGSGAGAGSGAGAGSGAGAGSGAAVTGRGDSPASAAGYGAGAGSGAGAGSGAGAGSGAGAGSGAGAGSGVGVGPGVGVGPGVGVGPGVGVGPGVGVGPGVGVGPGVGVGPGVGVGPGAGAGSGAGAGSGAGAGSGAGAGSGAGAGSGAGAGSGAGAGSGAGAGSGAGAGSGAGAGSGAGAGSGAGAGSGAAVTGRGDSPASAAGYGAGAGSGAGAGSGAGAGSGAGAGSGAGAGSGVGVGPGVGVGPGVGVGPGVGVGPGVGVGPGVGVGPGVGVGPGVGVGPGAGAGSGAGAGSGAGAGSGAGAGSGAGAGSGAGAGSGAGAGSGAGAGSGAGAGSGAGAGSGAGAGSGAGAGSGAAVTGRGDSPASAAGYGAGAGSGAGAGSGAGAGSGAGAGSGAGAGSGVGVGPGVGVGPGVGVGPGVGVGPGVGVGPGVGVGPGVGVGPGVGVGPGAGAGSGAGAGSGAGAGSGAGAGSGAGAGSGAGAGSGAGAGSGAGAGSGAGAGSGAGAGSGAGAGSGAGAGSGAAVTGRGDSPASAAGYGAGAGSGAGAGSGAGAGSGAGAGSGAGAGSGVGVGPGVGVGPGVGVGPGVGVGPGVGVGPGVGVGPGVGVGPGVGVGPGAGAGSGAGAGSGAGAGSGAGAGSGAGAGSGAGAGSGAGAGSGAGAGSGAGAGSGAGAGSGAGAGSGAGAGSGAAVTGRGDSPASAAGYGAGAGSGAGAGSGAGAGSGAGAGSGAGAGSGVGVGPGVGVGPGVGVGPGVGVGPGVGVGPGVGVGPGVGVGPGVGVGP

SEQ ID NO: 11 - protein, 312 aa, Artificial Sequence
  synthetic construct; SELP peptide
GAGAGSGAGAGSGVGVPGVGVPGVGVPGVGVPGKGVPGVGVPGVGVPGVGVPGAGAGSGAGAGSGVGVPGVGVPGVGVPGVGVPGKGVPGVGVPGVGVPGVGVPGAGAGSGAGAGSGVGVPGVGVPGVGVPGVGVPGKGVPGVGVPGVGVPGVGVPGAGAGSGAGAGSGVGVPGVGVPGVGVPGVGVPGKGVPGVGVPGVGVPGVGVPGAGAGSGAGAGSGVGVPGVGVPGVGVPGVGVPGKGVPGVGVPGVGVPGVGVPGAGAGSGAGAGSGVGVPGVGVPGVGVPGVGVPGKGVPGVGVPGVGVPGVGVP

SEQ ID NO: 12 - protein, 624 aa, Artificial Sequence
  synthetic construct; SELP peptide
GAGAGSGAGAGSGVGVPGVGVPGVGVPGVGVPGKGVPGVGVPGVGVPGVGVPGAGAGSGAGAGSGVGVPGVGVPGVGVPGVGVPGKGVPGVGVPGVGVPGVGVPGAGAGSGAGAGSGVGVPGVGVPGVGVPGVGVPGKGVPGVGVPGVGVPGVGVPGAGAGSGAGAGSGVGVPGVGVPGVGVPGVGVPGKGVPGVGVPGVGVPGVGVPGAGAGSGAGAGSGVGVPGVGVPGVGVPGVGVPGKGVPGVGVPGVGVPGVGVPGAGAGSGAGAGSGVGVPGVGVPGVGVPGVGVPGKGVPGVGVPGVGVPGVGVPGAGAGSGAGAGSGVGVPGVGVPGVGVPGVGVPGKGVPGVGVPGVGVPGVGVPGAGAGSGAGAGSGVGVPGVGVPGVGVPGVGVPGKGVPGVGVPGVGVPGVGVPGAGAGSGAGAGSGVGVPGVGVPGVGVPGVGVPGKGVPGVGVPGVGVPGVGVPGAGAGSGAGAGSGVGVPGVGVPGVGVPGVGVPGKGVPGVGVPGVGVPGVGVPGAGAGSGAGAGSGVGVPGVGVPGVGVPGVGVPGKGVPGVGVPGVGVPGVGVPGAGAGSGAGAGSGVGVPGVGVPGVGVPGVGVPGKGVPGVGVPGVGVPGVGVP

SEQ ID NO: 13 - protein, 936 aa, Artificial Sequence
  synthetic construct; SELP peptide
GAGAGSGAGAGSGVGVPGVGVPGVGVPGVGVPGKGVPGVGVPGVGVPGVGVPGAGAGSGAGAGSGVGVPGVGVPGVGVPGVGVPGKGVPGVGVPGVGVPGVGVPGAGAGSGAGAGSGVGVPGVGVPGVGVPGVGVPGKGVPGVGVPGVGVPGVGVPGAGAGSGAGAGSGVGVPGVGVPGVGVPGVGVPGKGVPGVGVPGVGVPGVGVPGAGAGSGAGAGSGVGVPGVGVPGVGVPGVGVPGKGVPGVGVPGVGVPGVGVPGAGAGSGAGAGSGVGVPGVGVPGVGVPGVGVPGKGVPGVGVPGVGVPGVGVPGAGAGSGAGAGSGVGVPGVGVPGVGVPGVGVPGKGVPGVGVPGVGVPGVGVPGAGAGSGAGAGSGVGVPGVGVPGVGVPGVGVPGKGVPGVGVPGVGVPGVGVPGAGAGSGAGAGSGVGVPGVGVPGVGVPGVGVPGKGVPGVGVPGVGVPGVGVPGAGAGSGAGAGSGVGVPGVGVPGVGVPGVGVPGKGVPGVGVPGVGVPGVGVPGAGAGSGAGAGSGVGVPGVGVPGVGVPGVGVPGKGVPGVGVPGVGVPGVGVPGAGAGSGAGAGSGVGVPGVGVPGVGVPGVGVPGKGVPGVGVPGVGVPGVGVPGAGAGSGAGAGSGVGVPGVGVPGVGVPGVGVPGKGVPGVGVPGVGVPGVGVPGAGAGSGAGAGSGVGVPGVGVPGVGVPGVGVPGKGVPGVGVPGVGVPGVGVPGAGAGSGAGAGSGVGVPGVGVPGVGVPGVGVPGKGVPGVGVPGVGVPGVGVPGAGAGSGAGAGSGVGVPGVGVPGVGVPGVGVPGKGVPGVGVPGVGVPGVGVPGAGAGSGAGAGSGVGVPGVGVPGVGVPGVGVPGKGVPGVGVPGVGVPGVGVPGAGAGSGAGAGSGVGVPGVGVPGVGVPGVGVPGKGVPGVGVPGVGVPGVGVP

SEQ ID NO: 14 - protein, 896 aa, Artificial Sequence
  synthetic construct; SELP peptide
GAGAGSGAGAGSGVGVPGVGVPGVGVPGVGVPGKGVPGVGVPGVGVPGVGVPGAGAGSGAGAGSGVGVPGVGVPGVGVPGVGVPGKGVPGVGVPGVGVPGVGVPGAGAGSGAGAGSGVGVPGVGVPGVGVPGVGVPGKGVPGVGVPGVGVPGVGVPGAGAGSGAGAGSGVGVPGVGVPGVGVPGVGVPGKGVPGVGVPGVGVPGVGVPGAGAGSGAGAGSGVGVPGVGVPGVGVPGVGVPGKGVPGVGVPGVGVPGVGVPGAGAGSGAGAGSGVGVPGVGVPGVGVPGVGVPGKGVPGVGVPGVGVPGVGVPGAGAGSGAGAGSGVGVPGVGVPGVGVPGVGVPGKGVPGVGVPGVGVPGVGVPGAGAGSGAGAGSGVGVPGVGVPGVGVPGVGVPGKGVPGVGVPGVGVPGVGVPGAGAGSGAGAGSGVGVPGVGVPGVGVPGVGVPGKGVPGVGVPGVGVPGVGVPGAGAGSGAGAGSGVGVPGVGVPGVGVPGVGVPGKGVPGVGVPGVGVPGVGVPGAGAGSGAGAGSGVGVPGVGVPGVGVPGVGVPGKGVPGVGVPGVGVPGVGVPGAGAGSGAGAGSGVGVPGVGVPGVGVPGVGVPGKGVPGVGVPGVGVPGVGVPGAGAGSGAGAGSGVGVPGVGVPGVGVPGVGVPGKGVPGVGVPGVGVPGVGVPGAGAGSGAGAGSGVGVPGVGVPGVGVPGVGVPGKGVPGVGVPGVGVPGVGVPGAGAGSGAGAGSGVGVPGVGVPGVGVPGVGVPGKGVPGVGVPGVGVPGVGVPGAGAGSGAGAGSGVGVPGVGVPGVGVPGVGVPGKGVPGVGVPGVGVPGVGVPGAGAGSGAGAGSGVGVPGVGVPGVGVPGVGVPGKGVPGVGVPGVGVPGVGVPGAGAGSGAGAGS

SEQ ID NO: 15 - protein, 832 aa, Artificial Sequence
  synthetic construct; SELP peptide
GAGAGSGAGAGSGVGVPGVGVPGVGVPGVGVPGKGVPGVGVPGVGVPGVGVPGAGAGSGAGAGSGAGAGSGAGAGSGVGVPGVGVPGVGVPGVGVPGKGVPGVGVPGVGVPGVGVPGAGAGSGAGAGSGAGAGSGAGAGSGVGVPGVGVPGVGVPGVGVPGKGVPGVGVPGVGVPGVGVPGAGAGSGAGAGSGAGAGSGAGAGSGVGVPGVGVPGVGVPGVGVPGKGVPGVGVPGVGVPGVGVPGAGAGSGAGAGSGAGAGSGAGAGSGVGVPGVGVPGVGVPGVGVPGKGVPGVGVPGVGVPGVGVPGAGAGSGAGAGSGAGAGSGAGAGSGVGVPGVGVPGVGVPGVGVPGKGVPGVGVPGVGVPGVGVPGAGAGSGAGAGSGAGAGSGAGAGSGVGVPGVGVPGVGVPGVGVPGKGVPGVGVPGVGVPGVGVPGAGAGSGAGAGSGAGAGSGAGAGSGVGVPGVGVPGVGVPGVGVPGKGVPGVGVPGVGVPGVGVPGAGAGSGAGAGSGAGAGSGAGAGSGVGVPGVGVPGVGVPGVGVPGKGVPGVGVPGVGVPGVGVPGAGAGSGAGAGSGAGAGSGAGAGSGVGVPGVGVPGVGVPGVGVPGKGVPGVGVPGVGVPGVGVPGAGAGSGAGAGSGAGAGSGAGAGSGVGVPGVGVPGVGVPGVGVPGKGVPGVGVPGVGVPGVGVPGAGAGSGAGAGSGAGAGSGAGAGSGVGVPGVGVPGVGVPGVGVPGKGVPGVGVPGVGVPGVGVPGAGAGSGAGAGSGAGAGSGAGAGSGVGVPGVGVPGVGVPGVGVPGKGVPGVGVPGVGVPGVGVPGAGAGSGAGAGS

SEQ ID NO: 16 - protein, 696 aa, Artificial Sequence
  synthetic construct; SELP peptide
GAGAGSGVGVPGVGVPGVGVPGVGVPGKGVPGVGVPGVGVPGVGVPGAGAGSGAGAGSGAGAGSGVGVPGVGVPGVGVPGVGVPGKGVPGVGVPGVGVPGVGVPGAGAGSGAGAGSGAGAGSGVGVPGVGVPGVGVPGVGVPGKGVPGVGVPGVGVPGVGVPGAGAGSGAGAGSGAGAGSGVGVPGVGVPGVGVPGVGVPGKGVPGVGVPGVGVPGVGVPGAGAGSGAGAGSGAGAGSGVGVPGVGVPGVGVPGVGVPGKGVPGVGVPGVGVPGVGVPGAGAGSGAGAGSGAGAGSGVGVPGVGVPGVGVPGVGVPGKGVPGVGVPGVGVPGVGVPGAGAGSGAGAGSGAGAGSGVGVPGVGVPGVGVPGVGVPGKGVPGVGVPGVGVPGVGVPGAGAGSGAGAGSGAGAGSGVGVPGVGVPGVGVPGVGVPGKGVPGVGVPGVGVPGVGVPGAGAGSGAGAGSGAGAGSGVGVPGVGVPGVGVPGVGVPGKGVPGVGVPGVGVPGVGVPGAGAGSGAGAGSGAGAGSGVGVPGVGVPGVGVPGVGVPGKGVPGVGVPGVGVPGVGVPGAGAGSGAGAGSGAGAGSGVGVPGVGVPGVGVPGVGVPGKGVPGVGVPGVGVPGVGVPGAGAGSGAGAGSGAGAGSGVGVPGVGVPGVGVPGVGVPGKGVPGVGVPGVGVPGVGVPGAGAGSGAGAGS

SEQ ID NO: 17 - protein, 612 aa, Artificial Sequence
  synthetic construct; SELP peptide
GVGVPGVGVPGVGVPGVGVPGKGVPGVGVPGVGVPGVGVPGVGVPGVGVPGVGVPGVGVPGVGVPGVGVPGVGVPGVGVPGAGAGSGAGAGSGAGAGSGAGAGSGVGVPGVGVPGVGVPGVGVPGKGVPGVGVPGVGVPGVGVPGVGVPGVGVPGVGVPGVGVPGVGVPGVGVPGVGVPGVGVPGAGAGSGAGAGSGAGAGSGAGAGSGVGVPGVGVPGVGVPGVGVPGKGVPGVGVPGVGVPGVGVPGVGVPGVGVPGVGVPGVGVPGVGVPGVGVPGVGVPGVGVPGAGAGSGAGAGSGAGAGSGAGAGSGVGVPGVGVPGVGVPGVGVPGKGVPGVGVPGVGVPGVGVPGVGVPGVGVPGVGVPGVGVPGVGVPGVGVPGVGVPGVGVPGAGAGSGAGAGSGAGAGSGAGAGSGVGVPGVGVPGVGVPGVGVPGKGVPGVGVPGVGVPGVGVPGVGVPGVGVPGVGVPGVGVPGVGVPGVGVPGVGVPGVGVPGAGAGSGAGAGSGAGAGSGAGAGSGVGVPGVGVPGVGVPGVGVPGKGVPGVGVPGVGVPGVGVPGVGVPGVGVPGVGVPGVGVPGVGVPGVGVPGVGVPGVGVPGAGAGSGAGAGS

SEQ ID NO: 18 - protein, 820 aa, Artificial Sequence
  synthetic construct; SELP peptide
GVGVPGVGVPGVGVPGVGVPGKGVPGVGVPGVGVPGVGVPGVGVPGVGVPGVGVPGVGVPGVGVPGVGVPGVGVPGVGVPGAGAGSGAGAGSGAGAGSGAGAGSGVGVPGVGVPGVGVPGVGVPGKGVPGVGVPGVGVPGVGVPGVGVPGVGVPGVGVPGVGVPGVGVPGVGVPGVGVPGVGVPGAGAGSGAGAGSGAGAGSGAGAGSGVGVPGVGVPGVGVPGVGVPGKGVPGVGVPGVGVPGVGVPGVGVPGVGVPGVGVPGVGVPGVGVPGVGVPGVGVPGVGVPGAGAGSGAGAGSGAGAGSGAGAGSGVGVPGVGVPGVGVPGVGVPGKGVPGVGVPGVGVPGVGVPGVGVPGVGVPGVGVPGVGVPGVGVPGVGVPGVGVPGVGVPGAGAGSGAGAGSGAGAGSGAGAGSGVGVPGVGVPGVGVPGVGVPGKGVPGVGVPGVGVPGVGVPGVGVPGVGVPGVGVPGVGVPGVGVPGVGVPGVGVPGVGVPGAGAGSGAGAGSGAGAGSGAGAGSGVGVPGVGVPGVGVPGVGVPGKGVPGVGVPGVGVPGVGVPGVGVPGVGVPGVGVPGVGVPGVGVPGVGVPGVGVPGVGVPGAGAGSGAGAGSGAGAGSGAGAGSGVGVPGVGVPGVGVPGVGVPGKGVPGVGVPGVGVPGVGVPGVGVPGVGVPGVGVPGVGVPGVGVPGVGVPGVGVPGVGVPGAGAGSGAGAGSGAGAGSGAGAGSGVGVPGVGVPGVGVPGVGVPGKGVPGVGVPGVGVPGVGVPGVGVPGVGVPGVGVPGVGVPGVGVPGVGVPGVGVPGVGVPGAGAGSGAGAGS

SEQ ID NO: 19 - protein, 1028 aa, Artificial Sequence
  synthetic construct; SELP peptide
GVGVPGVGVPGVGVPGVGVPGKGVPGVGVPGVGVPGVGVPGVGVPGVGVPGVGVPGVGVPGVGVPGVGVPGVGVPGVGVPGAGAGSGAGAGSGAGAGSGAGAGSGVGVPGVGVPGVGVPGVGVPGKGVPGVGVPGVGVPGVGVPGVGVPGVGVPGVGVPGVGVPGVGVPGVGVPGVGVPGVGVPGAGAGSGAGAGSGAGAGSGAGAGSGVGVPGVGVPGVGVPGVGVPGKGVPGVGVPGVGVPGVGVPGVGVPGVGVPGVGVPGVGVPGVGVPGVGVPGVGVPGVGVPGAGAGSGAGAGSGAGAGSGAGAGSGVGVPGVGVPGVGVPGVGVPGKGVPGVGVPGVGVPGVGVPGVGVPGVGVPGVGVPGVGVPGVGVPGVGVPGVGVPGVGVPGAGAGSGAGAGSGAGAGSGAGAGSGVGVPGVGVPGVGVPGVGVPGKGVPGVGVPGVGVPGVGVPGVGVPGVGVPGVGVPGVGVPGVGVPGVGVPGVGVPGVGVPGAGAGSGAGAGSGAGAGSGAGAGSGVGVPGVGVPGVGVPGVGVPGKGVPGVGVPGVGVPGVGVPGVGVPGVGVPGVGVPGVGVPGVGVPGVGVPGVGVPGVGVPGAGAGSGAGAGSGAGAGSGAGAGSGVGVPGVGVPGVGVPGVGVPGKGVPGVGVPGVGVPGVGVPGVGVPGVGVPGVGVPGVGVPGVGVPGVGVPGVGVPGVGVPGAGAGSGAGAGSGAGAGSGAGAGSGVGVPGVGVPGVGVPGVGVPGKGVPGVGVPGVGVPGVGVPGVGVPGVGVPGVGVPGVGVPGVGVPGVGVPGVGVPGVGVPGAGAGSGAGAGSGAGAGSGAGAGSGVGVPGVGVPGVGVPGVGVPGKGVPGVGVPGVGVPGVGVPGVGVPGVGVPGVGVPGVGVPGVGVPGVGVPGVGVPGVGVPGAGAGSGAGAGSGAGAGSGAGAGSGVGVPGVGVPGVGVPGVGVPGKGVPGVGVPGVGVPGVGVPGVGVPGVGVPGVGVPGVGVPGVGVPGVGVPGVGVPGVGVPGAGAGSGAGAGS

SEQ ID NO: 20 - protein, 768 aa, Artificial Sequence
  synthetic construct; SELP peptide
GAGSGAGAGSGAGAGSGVGVPGVGVPGVGVPGVGVPGKGVPGVGVPGVGVPGVGVPGVGVPGVGVPGVGVPGVGVPGVGVPGVGVPGVGVPGVGVPGAGAGSGAGAGSGAGAGSGAGAGSGAGAGSGAGAGSGAGAGSGAGAGSGVGVPGVGVPGVGVPGVGVPGKGVPGVGVPGVGVPGVGVPGVGVPGVGVPGVGVPGVGVPGVGVPGVGVPGVGVPGVGVPGAGAGSGAGAGSGAGAGSGAGAGSGAGAGSGAGAGSGAGAGSGAGAGSGVGVPGVGVPGVGVPGVGVPGKGVPGVGVPGVGVPGVGVPGVGVPGVGVPGVGVPGVGVPGVGVPGVGVPGVGVPGVGVPGAGAGSGAGAGSGAGAGSGAGAGSGAGAGSGAGAGSGAGAGSGAGAGSGVGVPGVGVPGVGVPGVGVPGKGVPGVGVPGVGVPGVGVPGVGVPGVGVPGVGVPGVGVPGVGVPGVGVPGVGVPGVGVPGAGAGSGAGAGSGAGAGSGAGAGSGAGAGSGAGAGSGAGAGSGAGAGSGVGVPGVGVPGVGVPGVGVPGKGVPGVGVPGVGVPGVGVPGVGVPGVGVPGVGVPGVGVPGVGVPGVGVPGVGVPGVGVPGAGAGSGAGAGSGAGAGSGAGAGSGAGAGSGAGAGSGAGAGSGAGAGSGVGVPGVGVPGVGVPGVGVPGKGVPGVGVPGVGVPGVGVPGVGVPGVGVPGVGVPGVGVPGVGVPGVGVPGVGVPGVGVPGAGAGSGAGAGSGAGAGSGAGAGSGAGAGSGA

SEQ ID NO: 21 - protein, 882 aa, Artificial Sequence
  synthetic construct; SELP peptide
GAGAGSGAGAGSGVGVPLGPLGPGVGVPGVGVPGVGVPGKGVPGVGVPGVGVPGVGVPGAGAGSGAGAGSGVGVPLGPLGPGVGVPGVGVPGVGVPGKGVPGVGVPGVGVPGVGVPGAGAGSGAGAGSGVGVPLGPLGPGVGVPGVGVPGVGVPGKGVPGVGVPGVGVPGVGVPGAGAGSGAGAGSGVGVPLGPLGPGVGVPGVGVPGVGVPGKGVPGVGVPGVGVPGVGVPGAGAGSGAGAGSGVGVPLGPLGPGVGVPGVGVPGVGVPGKGVPGVGVPGVGVPGVGVPGAGAGSGAGAGSGVGVPLGPLGPGVGVPGVGVPGVGVPGKGVPGVGVPGVGVPGVGVPGAGAGSGAGAGSGVGVPLGPLGPGVGVPGVGVPGVGVPGKGVPGVGVPGVGVPGVGVPGAGAGSGAGAGSGVGVPLGPLGPGVGVPGVGVPGVGVPGKGVPGVGVPGVGVPGVGVPGAGAGSGAGAGSGVGVPLGPLGPGVGVPGVGVPGVGVPGKGVPGVGVPGVGVPGVGVPGAGAGSGAGAGSGVGVPLGPLGPGVGVPGVGVPGVGVPGKGVPGVGVPGVGVPGVGVPGAGAGSGAGAGSGVGVPLGPLGPGVGVPGVGVPGVGVPGKGVPGVGVPGVGVPGVGVPGAGAGSGAGAGSGVGVPLGPLGPGVGVPGVGVPGVGVPGKGVPGVGVPGVGVPGVGVPGAGAGSGAGAGSGVGVPLGPLGPGVGVPGVGVPGVGVPGKGVPGVGVPGVGVPGVGVPGAGAGSGAGAGSGVGVPLGPLGPGVGVPGVGVPGVGVPGKGVPGVGVPGVGVPGVGVPGAGAGSGAGAGSGVGVPLGPLGPGVGVPGVGVPGVGVPGKGVPGVGVPGVGVPGVGVPGAGAGSGAGAGS

SEQ ID NO: 22 - protein, 912 aa, Artificial Sequence
  synthetic construct; SELP peptide
GAGAGSGAGAGSGVGVPGFFVRARRGVGVPGVGVPGVGVPGKGVPGVGVPGVGVPGVGVPGAGAGSGAGAGSGVGVPGFFVRARRGVGVPGVGVPGVGVPGKGVPGVGVPGVGVPGVGVPGAGAGSGAGAGSGVGVPGFFVRARRGVGVPGVGVPGVGVPGKGVPGVGVPGVGVPGVGVPGAGAGSGAGAGSGVGVPGFFVRARRGVGVPGVGVPGVGVPGKGVPGVGVPGVGVPGVGVPGAGAGSGAGAGSGVGVPGFFVRARRGVGVPGVGVPGVGVPGKGVPGVGVPGVGVPGVGVPGAGAGSGAGAGSGVGVPGFFVRARRGVGVPGVGVPGVGVPGKGVPGVGVPGVGVPGVGVPGAGAGSGAGAGSGVGVPGFFVRARRGVGVPGVGVPGVGVPGKGVPGVGVPGVGVPGVGVPGAGAGSGAGAGSGVGVPGFFVRARRGVGVPGVGVPGVGVPGKGVPGVGVPGVGVPGVGVPGAGAGSGAGAGSGVGVPGFFVRARRGVGVPGVGVPGVGVPGKGVPGVGVPGVGVPGVGVPGAGAGSGAGAGSGVGVPGFFVRARRGVGVPGVGVPGVGVPGKGVPGVGVPGVGVPGVGVPGAGAGSGAGAGSGVGVPGFFVRARRGVGVPGVGVPGVGVPGKGVPGVGVPGVGVPGVGVPGAGAGSGAGAGSGVGVPGFFVRARRGVGVPGVGVPGVGVPGKGVPGVGVPGVGVPGVGVPGAGAGSGAGAGSGVGVPGFFVRARRGVGVPGVGVPGVGVPGKGVPGVGVPGVGVPGVGVPGAGAGSGAGAGSGVGVPGFFVRARRGVGVPGVGVPGVGVPGKGVPGVGVPGVGVPGVGVPGAGAGSGAGAGSGVGVPGFFVRARRGVGVPGVGVPGVGVPGKGVPGVGVPGVGVPGVGVPGAGAGSGAGAGS

SEQ ID NO: 23 - protein, 820 aa, Artificial Sequence
  synthetic construct; SELP peptide
MDPVVLQRRDWENPGVTQLNRLAAHPPFASDPMGAGSGAGAGSGAGAGSGVGVPGVGVPGVGVPGVGVPGKGVPGVGVPGVGVPGVGVPGVGVPGVGVPGVGVPGVGVPGVGVPGVGVPGVGVPGVGVPGAGAGSGAGAGSGAGAGSGAGAGSGAGAGSGAGAGSGAGAGSGAGAGSGVGVPGVGVPGVGVPGVGVPGKGVPGVGVPGVGVPGVGVPGVGVPGVGVPGVGVPGVGVPGVGVPGVGVPGVGVPGVGVPGAGAGSGAGAGSGAGAGSGAGAGSGAGAGSGAGAGSGAGAGSGAGAGSGVGVPGVGVPGVGVPGVGVPGKGVPGVGVPGVGVPGVGVPGVGVPGVGVPGVGVPGVGVPGVGVPGVGVPGVGVPGVGVPGAGAGSGAGAGSGAGAGSGAGAGSGAGAGSGAGAGSGAGAGSGAGAGSGVGVPGVGVPGVGVPGVGVPGKGVPGVGVPGVGVPGVGVPGVGVPGVGVPGVGVPGVGVPGVGVPGVGVPGVGVPGVGVPGAGAGSGAGAGSGAGAGSGAGAGSGAGAGSGAGAGSGAGAGSGAGAGSGVGVPGVGVPGVGVPGVGVPGKGVPGVGVPGVGVPGVGVPGVGVPGVGVPGVGVPGVGVPGVGVPGVGVPGVGVPGVGVPGAGAGSGAGAGSGAGAGSGAGAGSGAGAGSGAGAGSGAGAGSGAGAGSGVGVPGVGVPGVGVPGVGVPGKGVPGVGVPGVGVPGVGVPGVGVPGVGVPGVGVPGVGVPGVGVPGVGVPGVGVPGVGVPGAGAGSGAGAGSGAGAGSGAGAGSGAGAGSGAGAMDPGRYQDLRSHHHHHH

SEQ ID NO: 24 - protein, 877 aa, Artificial Sequence
  synthetic construct; SELP peptide
MDPVVLQQRDWENPGVTQLVRLAAHPPFASDPMGAGSGAGAGSGVGVPGVGVPGVGVPGVGVPGKGVPGVGVPGVGVPGVGVPGAGAGSGAGAGSGAGAGSGAGAGSGVGVPGVGVPGVGVPGVGVPGKGVPGVGVPGVGVPGVGVPGAGAGSGAGAGSGAGAGSGAGAGSGVGVPGVGVPGVGVPGVGVPGKGVPGVGVPGVGVPGVGVPGAGAGSGAGAGSGAGAGSGAGAGSGVGVPGVGVPGVGVPGVGVPGKGVPGVGVPGVGVPGVGVPGAGAGSGAGAGSGAGAGSGAGAGSGVGVPGVGVPGVGVPGVGVPGKGVPGVGVPGVGVPGVGVPGAGAGSGAGAGSGAGAGSGAGAGSGVGVPGVGVPGVGVPGVGVPGKGVPGVGVPGVGVPGVGVPGAGAGSGAGAGSGAGAGSGAGAGSGVGVPGVGVPGVGVPGVGVPGKGVPGVGVPGVGVPGVGVPGAGAGSGAGAGSGAGAGSGAGAGSGVGVPGVGVPGVGVPGVGVPGKGVPGVGVPGVGVPGVGVPGAGAGSGAGAGSGAGAGSGAGAGSGVGVPGVGVPGVGVPGVGVPGKGVPGVGVPGVGVPGVGVPGAGAGSGAGAGSGAGAGSGAGAGSGVGVPGVGVPGVGVPGVGVPGKGVPGVGVPGVGVPGVGVPGAGAGSGAGAGSGAGAGSGAGAGSGVGVPGVGVPGVGVPGVGVPGKGVPGVGVPGVGVPGVGVPGAGAGSGAGAGSGAGAGSGAGAGSGVGVPGVGVPGVGVPGVGVPGKGVPGVGVPGVGVPGVGVPGAGAGSGAGAGSGAGAGSGAGAGSGVGVPGVGVPGVGVPGVGVPGKGVPGVGVPGVGVPGAGAGSGAGAGSGAMDPGRYQDLRSHHHHHH

SEQ ID NO: 25 - protein, 221102 aa, Artificial Sequence
  synthetic construct; SELP peptide
  MISC_FEATURE (11)..(604): amino acids 11-604 can be present or absent
  MISC_FEATURE (610)..(1103): amino acids 610-1103 can be present or absent
  MISC_FEATURE (1106)..(1106): Xaa can be any amino acid
  MISC_FEATURE (1114)..(1608): amino acids 1114-1608 can be present or absent
  MISC_FEATURE (1615)..(2209): amino acids 1114-1608 can be present or absent
  MISC_FEATURE (2212)..(221100): amino acids 2212-221,100 can be present or absent
  MISC_FEATURE (3317)..(3317): Xaa can be any amino acid
  MISC_FEATURE (5528)..(5528): Xaa can be any amino acid
  MISC_FEATURE (7739)..(7739): Xaa can be any amino acid
  MISC_FEATURE (9950)..(9950): Xaa can be any amino acid
  MISC_FEATURE (12161)..(12161): Xaa can be any amino acid
  MISC_FEATURE (14372)..(14372): Xaa can be any amino acid
  MISC_FEATURE (16583)..(16583): Xaa can be any amino acid
  MISC_FEATURE (18794)..(18794): Xaa can be any amino acid
  MISC_FEATURE (21005)..(21005): Xaa can be any amino acid
  MISC_FEATURE (23216)..(23216): Xaa can be any amino acid
  MISC_FEATURE (25427)..(25427): Xaa can be any amino acid
  MISC_FEATURE (27638)..(27638): Xaa can be any amino acid
  MISC_FEATURE (29849)..(29849): Xaa can be any amino acid
  MISC_FEATURE (32060)..(32060): Xaa can be any amino acid
  MISC_FEATURE (34271)..(34271): Xaa can be any amino acid
  MISC_FEATURE (36482)..(36482): Xaa can be any amino acid
  MISC_FEATURE (38693)..(38693): Xaa can be any amino acid
  MISC_FEATURE (40904)..(40904): Xaa can be any amino acid
  MISC_FEATURE (43115)..(43115): Xaa can be any amino acid
  MISC_FEATURE (45326)..(45326): Xaa can be any amino acid
  MISC_FEATURE (47537)..(47537): Xaa can be any amino acid
  MISC_FEATURE (49748)..(49748): Xaa can be any amino acid
  MISC_FEATURE (51959)..(51959): Xaa can be any amino acid
  MISC_FEATURE (54170)..(54170): Xaa can be any amino acid
  MISC_FEATURE (56381)..(56381): Xaa can be any amino acid
  MISC_FEATURE (58592)..(58592): Xaa can be any amino acid
  MISC_FEATURE (60803)..(60803): Xaa can be any amino acid
  MISC_FEATURE (63014)..(63014): Xaa can be any amino acid
  MISC_FEATURE (65225)..(65225): Xaa can be any amino acid
  MISC_FEATURE (67436)..(67436): Xaa can be any amino acid
  MISC_FEATURE (69647)..(69647): Xaa can be any amino acid
  MISC_FEATURE (71858)..(71858): Xaa can be any amino acid
  MISC_FEATURE (74069)..(74069): Xaa can be any amino acid
  MISC_FEATURE (76280)..(76280): Xaa can be any amino acid
  MISC_FEATURE (78491)..(78491): Xaa can be any amino acid
  MISC_FEATURE (80702)..(80702): Xaa can be any amino acid
  MISC_FEATURE (82913)..(82913): Xaa can be any amino acid
  MISC_FEATURE (85124)..(85124): Xaa can be any amino acid
  MISC_FEATURE (87335)..(87335): Xaa can be any amino acid
  MISC_FEATURE (89546)..(89546): Xaa can be any amino acid
  MISC_FEATURE (91757)..(91757): Xaa can be any amino acid
  MISC_FEATURE (93968)..(93968): Xaa can be any amino acid
  MISC_FEATURE (96179)..(96179): Xaa can be any amino acid
  MISC_FEATURE (98390)..(98390): Xaa can be any amino acid
  MISC_FEATURE (100601)..(100601): Xaa can be any amino acid
  MISC_FEATURE (102812)..(102812): Xaa can be any amino acid
  MISC_FEATURE (105023)..(105023): Xaa can be any amino acid
  MISC_FEATURE (107234)..(107234): Xaa can be any amino acid
  MISC_FEATURE (109445)..(109445): Xaa can be any amino acid
  MISC_FEATURE (111656)..(111656): Xaa can be any amino acid
  MISC_FEATURE (113867)..(113867): Xaa can be any amino acid
  MISC_FEATURE (116078)..(116078): Xaa can be any amino acid
  MISC_FEATURE (118289)..(118289): Xaa can be any amino acid
  MISC_FEATURE (120500)..(120500): Xaa can be any amino acid
  MISC_FEATURE (122711)..(122711): Xaa can be any amino acid
  MISC_FEATURE (124922)..(124922): Xaa can be any amino acid
  MISC_FEATURE (127133)..(127133): Xaa can be any amino acid
  MISC_FEATURE (129344)..(129344): Xaa can be any amino acid
  MISC_FEATURE (131555)..(131555): Xaa can be any amino acid
  MISC_FEATURE (133766)..(133766): Xaa can be any amino acid
  MISC_FEATURE (135977)..(135977): Xaa can be any amino acid
  MISC_FEATURE (138188)..(138188): Xaa can be any amino acid
  MISC_FEATURE (140399)..(140399): Xaa can be any amino acid
  MISC_FEATURE (142610)..(142610): Xaa can be any amino acid
  MISC_FEATURE (144821)..(144821): Xaa can be any amino acid
  MISC_FEATURE (147032)..(147032): Xaa can be any amino acid
  MISC_FEATURE (149243)..(149243): Xaa can be any amino acid
  MISC_FEATURE (151454)..(151454): Xaa can be any amino acid
  MISC_FEATURE (153665)..(153665): Xaa can be any amino acid
  MISC_FEATURE (155876)..(155876): Xaa can be any amino acid
  MISC_FEATURE (158087)..(158087): Xaa can be any amino acid
  MISC_FEATURE (160298)..(160298): Xaa can be any amino acid
  MISC_FEATURE (162509)..(162509): Xaa can be any amino acid
  MISC_FEATURE (164720)..(164720): Xaa can be any amino acid
  MISC_FEATURE (166931)..(166931): Xaa can be any amino acid
  MISC_FEATURE (169142)..(169142): Xaa can be any amino acid
  MISC_FEATURE (171353)..(171353): Xaa can be any amino acid
  MISC_FEATURE (173564)..(173564): Xaa can be any amino acid
  MISC_FEATURE (175775)..(175775): Xaa can be any amino acid
  MISC_FEATURE (177986)..(177986): Xaa can be any amino acid
  MISC_FEATURE (180197)..(180197): Xaa can be any amino acid
  MISC_FEATURE (182408)..(182408): Xaa can be any amino acid
  MISC_FEATURE (184619)..(184619): Xaa can be any amino acid
  MISC_FEATURE (186830)..(186830): Xaa can be any amino acid
  MISC_FEATURE (189041)..(189041): Xaa can be any amino acid
  MISC_FEATURE (191252)..(191252): Xaa can be any amino acid
  MISC_FEATURE (193463)..(193463): Xaa can be any amino acid
  MISC_FEATURE (195674)..(195674): Xaa can be any amino acid
  MISC_FEATURE (197885)..(197885): Xaa can be any amino acid
  MISC_FEATURE (200096)..(200096): Xaa can be any amino acid
  MISC_FEATURE (202307)..(202307): Xaa can be any amino acid
  MISC_FEATURE (204518)..(204518): Xaa can be any amino acid
  MISC_FEATURE (206728)..(206728): Xaa can be any amino acid
  MISC_FEATURE (208940)..(208940): Xaa can be any amino acid
  MISC_FEATURE (211151)..(211151): Xaa can be any amino acid
  MISC_FEATURE (213362)..(213362): Xaa can be any amino acid
  MISC_FEATURE (215573)..(215573): Xaa can be any amino acid
  MISC_FEATURE (217784)..(217784): Xaa can be any amino acid
  MISC_FEATURE (219995)..(219995): Xaa can be any amino acid
GAGSGAGAGSGAGAGSGAGAGSGAGAGSGAGAGSGAGAGSGAGAGSGAGAGSGAGAGSGAGAGSGAGAGSGAGAGSGAGAGSGAGAGSGAGAGSGAGAGSGAGAGSGAGAGSGAGAGSGAGAGSGAGAGSGAGAGSGAGAGSGAGAGSGAGAGSGAGAGSGAGAGSGAGAGSGAGAGSGAGAGSGAGAGSGAGAGSGAGAGSGAGAGSGAGAGSGAGAGSGAGAGSGAGAGSGAGAGSGAGAGSGAGAGSGAGAGSGAGAGSGAGAGSGAGAGSGAGAGSGAGAGSGAGAGSGAGAGSGAGAGSGAGAGSGAGAGSGAGAGSGAGAGSGAGAGSGAGAGSGAGAGSGAGAGSGAGAGSGAGAGSGAGAGSGAGAGSGAGAGSGAGAGSGAGAGSGAGAGSGAGAGSGAGAGSGAGAGSGAGAGSGAGAGSGAGAGSGAGAGSGAGAGSGAGAGSGAGAGSGAGAGSGAGAGSGAGAGSGAGAGSGAGAGSGAGAGSGAGAGSGAGAGSGAGAGSGAGAGSGAGAGSGAGAGSGAGAGSGAGAGSGAGAGSGAGAGSGAGAGSGAGAGSGAGAGSGAGAGSGAGAGSGAGAGSGAGAGSGAGAGSGVGVPGVGVPGVGVPGVGVPGVGVPGVGVPGVGVPGVGVPGVGVPGVGVPGVGVPGVGVPGVGVPGVGVPGVGVPGVGVPGVGVPGVGVPGVGVPGVGVPGVGVPGVGVPGVGVPGVGVPGVGVPGVGVPGVGVPGVGVPGVGVPGVGVPGVGVPGVGVPGVGVPGVGVPGVGVPGVGVPGVGVPGVGVPGVGVPGVGVPGVGVPGVGVPGVGVPGVGVPGVGVPGVGVPGVGVPGVGVPGVGVPGVGVPGVGVPGVGVPGVGVPGVGVPGVGVPGVGVPGVGVPGVGVPGVGVPGVGVPGVGVPGVGVPGVGVPGVGVPGVGVPGVGVPGVGVPGVGVPGVGVPGVGVPGVGVPGVGVPGVGVPGVGVPGVGVPGVGVPGVGVPGVGVPGVGVPGVGVPGVGVPGVGVPGVGVPGVGVPGVGVPGVGVPGVGVPGVGVPGVGVPGVGVPGVGVPGVGVPGVGVPGVGVPGVGVPGVGVPGVGVPGVGVPGVGVPGVGVPGXGVPGVGVPGVGVPGVGVPGVGVPGVGVPGVGVPGVGVPGVGVPGVGVPGVGVPGVGVPGVGVPGVGVPGVGVPGVGVPGVGVPGVGVPGVGVPGVGVPGVGVPGVGVPGVGVPGVGVPGVGVPGVGVPGVGVPGVGVPGVGVPGVGVPGVGVPGVGVPGVGVPGVGVPGVGVPGVGVPGVGVPGVGVPGVGVPGVGVPGVGVPGVGVPGVGVPGVGVPGVGVPGVGVPGVGVPGVGVPGVGVPGVGVPGVGVPGVGVPGVGVPGVGVPGVGVPGVGVPGVGVPGVGVPGVGVPGVGVPGVGVPGVGVPGVGVPGVGVPGVGVPGVGVPGVGVPGVGVPGVGVPGVGVPGVGVPGVGVPGVGVPGVGVPGVGVPGVGVPGVGVPGVGVPGVGVPGVGVPGVGVPGVGVPGVGVPGVGVPGVGVPGVGVPGVGVPGVGVPGVGVPGVGVPGVGVPGVGVPGVGVPGVGVPGVGVPGVGVPGVGVPGVGVPGVGVPGVGVPGVGVPGAGAGSGAGAGSGAGAGSGAGAGSGAGAGSGAGAGSGAGAGSGAGAGSGAGAGSGAGAGSGAGAGSGAGAGSGAGAGSGAGAGSGAGAGSGAGAGSGAGAGSGAGAGSGAGAGSGAGAGSGAGAGSGAGAGSGAGAGSGAGAGSGAGAGSGAGAGSGAGAGSGAGAGSGAGAGSGAGAGSGAGAGSGAGAGSGAGAGSGAGAGSGAGAGSGAGAGSGAGAGSGAGAGSGAGAGSGAGAGSGAGAGSGAGAGSGAGAGSGAGAGSGAGAGSGAGAGSGAGAGSGAGAGSGAGAGSGAGAGSGAGAGSGAGAGSGAGAGSGAGAGSGAGAGSGAGAGSGAGAGSGAGAGSGAGAGSGAGAGSGAGAGSGAGAGSGAGAGSGAGAGSGAGAGSGAGAGSGAGAGSGAGAGSGAGAGSGAGAGSGAGAGSGAGAGSGAGAGSGAGAGSGAGAGSGAGAGSGAGAGSGAGAGSGAGAGSGAGAGSGAGAGSGAGAGSGAGAGSGAGAGSGAGAGSGAGAGSGAGAGSGAGAGSGAGAGSGAGAGSGAGAGSGAGAGSGAGAGSGAGAGSGAGAGSGAGAGSGAGAGSGAGAGSGAGAGSGAGAGSGAGAGSGAGAGSGAGAGSGAGAGSGAGAGSGAGAGSGAGAGSGAGAGSGAGAGSGAGAGSGAGAGSGAGAGSGAGAGSGAGAGSGAGAGSGAGAGSGAGAGSGAGAGSGAGAGSGAGAGSGAGAGSGAGAGSGAGAGSGAGAGSGAGAGSGAGAGSGAGAGSGAGAGSGAGAGSGAGAGSGAGAGSGAGAGSGAGAGSGAGAGSGAGAGSGAGAGSGAGAGSGAGAGSGAGAGSGAGAGSGAGAGSGAGAGSGAGAGSGAGAGSGAGAGSGAGAGSGAGAGSGAGAGSGAGAGSGAGAGSGAGAGSGAGAGSGAGAGSGAGAGSGAGAGSGAGAGSGAGAGSGAGAGSGAGAGSGAGAGSGAGAGSGAGAGSGAGAGSGAGAGSGAGAGSGAGAGSGAGAGSGAGAGSGAGAGSGAGAGSGAGAGSGAGAGSGAGAGSGAGAGSGAGAGSGAGAGSGAGAGSGAGAGSGAGAGSGAGAGSGAGAGSGAGAGSGAGAGSGAGAGSGAGAGSGAGAGSGAGAGSGAGAGSGAGAGSGAGAGSGAGAGSGAGAGSGAGAGSGAGAGSGAGAGSGAGAGSGAGAGSGAGAGSGAGAGSGAGAGSGAGAGSGVGVPGVGVPGVGVPGVGVPGVGVPGVGVPGVGVPGVGVPGVGVPGVGVPGVGVPGVGVPGVGVPGVGVPGVGVPGVGVPGVGVPGVGVPGVGVPGVGVPGVGVPGVGVPGVGVPGVGVPGVGVPGVGVPGVGVPGVGVPGVGVPGVGVPGVGVPGVGVPGVGVPGVGVPGVGVPGVGVPGVGVPGVGVPGVGVPGVGVPGVGVPGVGVPGVGVPGVGVPGVGVPGVGVPGVGVPGVGVPGVGVPGVGVPGVGVPGVGVPGVGVPGVGVPGVGVPGVGVPGVGVPGVGVPGVGVPGVGVPGVGVPGVGVPGVGVPGVGVPGVGVPGVGVPGVGVPGVGVPGVGVPGVGVPGVGVPGVGVPGVGVPGVGVPGVGVPGVGVPGVGVPGVGVPGVGVPGVGVPGVGVPGVGVPGVGVPGVGVPGVGVPGVGVPGVGVPGVGVPGVGVPGVGVPGVGVPGVGVPGVGVPGVGVPGVGVPGVGVPGVGVPGVGVPGVGVPGVGVPGXGVPGVGVPGVGVPGVGVPGVGVPGVGVPGVGVPGVGVPGVGVPGVGVPGVGVPGVGVPGVGVPGVGVPGVGVPGVGVPGVGVPGVGVPGVGVPGVGVPGVGVPGVGVPGVGVPGVGVPGVGVPGVGVPGVGVPGVGVPGVGVPGVGVPGVGVPGVGVPGVGVPGVGVPGVGVPGVGVPGVGVPGVGVPGVGVPGVGVPGVGVPGVGVPGVGVPGVGVPGVGVPGVGVPGVGVPGVGVPGVGVPGVGVPGVGVPGVGVPGVGVPGVGVPGVGVPGVGVPGVGVPGVGVPGVGVPGVGVPGVGVPGVGVPGVGVPGVGVPGVGVPGVGVPGVGVPGVGVPGVGVPGVGVPGVGVPGVGVPGVGVPGVGVPGVGVPGVGVPGVGVPGVGVPGVGVPGVGVPGVGVPGVGVPGVGVPGVGVPGVGVPGVGVPGVGVPGVGVPGVGVPGVGVPGVGVPGVGVPGVGVPGVGVPGVGVPGVGVPGVGVPGVGVPGVGVPGVGVPGVGVPGAGAGSGAGAGSGAGAGSGAGAGSGAGAGSGAGAGSGAGAGSGAGAGSGAGAGSGAGAGSGAGAGSGAGAGSGAGAGSGAGAGSGAGAGSGAGAGSGAGAGSGAGAGSGAGAGSGAGAGSGAGAGSGAGAGSGAGAGSGAGAGSGAGAGSGAGAGSGAGAGSGAGAGSGAGAGSGAGAGSGAGAGSGAGAGSGAGAGSGAGAGSGAGAGSGAGAGSGAGAGSGAGAGSGAGAGSGAGAGSGAGAGSGAGAGSGAGAGSGAGAGSGAGAGSGAGAGSGAGAGSGAGAGSGAGAGSGAGAGSGAGAGSGAGAGSGAGAGSGAGAGSGAGAGSGAGAGSGAGAGSGAGAGSGAGAGSGAGAGSGAGAGSGAGAGSGAGAGSGAGAGSGAGAGSGAGAGSGAGAGSGAGAGSGAGAGSGAGAGSGAGAGSGAGAGSGAGAGSGAGAGSGAGAGSGAGAGSGAGAGSGAGAGSGAGAGSGAGAGSGAGAGSGAGAGSGAGAGSGAGAGSGAGAGSGAGAGSGAGAGSGAGAGSGAGAGSGAGAGSGAGAGSGAGAGSGAGAGSGAGAGSGAGAGSGAGAGSGAGAGSGAGAGSGAGAGSGAGAGSGAGAGSGAGAGSGAGAGSGAGAGSGAGAGSGAGAGSGAGAGSGAGAGSGAGAGSGAGAGSGAGAGSGAGAGSGAGAGSGAGAGSGAGAGSGAGAGSGAGAGSGAGAGSGAGAGSGAGAGSGAGAGSGAGAGSGAGAGSGAGAGSGAGAGSGAGAGSGAGAGSGAGAGSGAGAGSGAGAGSGAGAGSGAGAGSGAGAGSGAGAGSGAGAGSGAGAGSGAGAGSGAGAGSGAGAGSGAGAGSGAGAGSGAGAGSGAGAGSGAGAGSGAGAGSGAGAGSGAGAGSGAGAGSGAGAGSGAGAGSGAGAGSGAGAGSGAGAGSGAGAGSGAGAGSGAGAGSGAGAGSGAGAGSGAGAGSGAGAGSGAGAGSGAGAGSGAGAGSGAGAGSGAGAGSGAGAGSGAGAGSGAGAGSGAGAGSGAGAGSGAGAGSGAGAGSGAGAGSGAGAGSGAGAGSGAGAGSGAGAGSGAGAGSGAGAGSGAGAGSGAGAGSGAGAGSGAGAGSGAGAGSGAGAGSGAGAGSGAGAGSGAGAGSGAGAGSGAGAGSGAGAGSGAGAGSGAGAGSGAGAGSGAGAGSGAGAGSGAGAGSGAGAGSGAGAGSGAGAGSGAGAGSGVGVPGVGVPGVGVPGVGVPGVGVPGVGVPGVGVPGVGVPGVGVPGVGVPGVGVPGVGVPGVGVPGVGVPGVGVPGVGVPGVGVPGVGVPGVGVPGVGVPGVGVPGVGVPGVGVPGVGVPGVGVPGVGVPGVGVPGVGVPGVGVPGVGVPGVGVPGVGVPGVGVPGVGVPGVGVPGVGVPGVGVPGVGVPGVGVPGVGVPGVGVPGVGVPGVGVPGVGVPGVGVPGVGVPGVGVPGVGVPGVGVPGVGVPGVGVPGVGVPGVGVPGVGVPGVGVPGVGVPGVGVPGVGVPGVGVPGVGVPGVGVPGVGVPGVGVPGVGVPGVGVPGVGVPGVGVPGVGVPGVGVPGVGVPGVGVPGVGVPGVGVPGVGVPGVGVPGVGVPGVGVPGVGVPGVGVPGVGVPGVGVPGVGVPGVGVPGVGVPGVGVPGVGVPGVGVPGVGVPGVGVPGVGVPGVGVPGVGVPGVGVPGVGVPGVGVPGVGVPGVGVPGVGVPGVGVPGVGVPGXGVPGVGVPGVGVPGVGVPGVGVPGVGVPGVGVPGVGVPGVGVPGVGVPGVGVPGVGVPGVGVPGVGVPGVGVPGVGVPGVGVPGVGVPGVGVPGVGVPGVGVPGVGVPGVGVPGVGVPGVGVPGVGVPGVGVPGVGVPGVGVPGVGVPGVGVPGVGVPGVGVPGVGVPGVGVPGVGVPGVGVPGVGVPGVGVPGVGVPGVGVPGVGVPGVGVPGVGVPGVGVPGVGVPGVGVPGVGVPGVGVPGVGVPGVGVPGVGVPGVGVPGVGVPGVGVPGVGVPGVGVPGVGVPGVGVPGVGVPGVGVPGVGVPGVGVPGVGVPGVGVPGVGVPGVGVPGVGVPGVGVPGVGVPGVGVPGVGVPGVGVPGVGVPGVGVPGVGVPGVGVPGVGVPGVGVPGVGVPGVGVPGVGVPGVGVPGVGVPGVGVPGVGVPGVGVPGVGVPGVGVPGVGVPGVGVPGVGVPGVGVPGVGVPGVGVPGVGVPGVGVPGVGVPGVGVPGVGVPGVGVPGAGAGSGAGAGSGAGAGSGAGAGSGAGAGSGAGAGSGAGAGSGAGAGSGAGAGSGAGAGSGAGAGSGAGAGSGAGAGSGAGAGSGAGAGSGAGAGSGAGAGSGAGAGSGAGAGSGAGAGSGAGAGSGAGAGSGAGAGSGAGAGSGAGAGSGAGAGSGAGAGSGAGAGSGAGAGSGAGAGSGAGAGSGAGAGSGAGAGSGAGAGSGAGAGSGAGAGSGAGAGSGAGAGSGAGAGSGAGAGSGAGAGSGAGAGSGAGAGSGAGAGSGAGAGSGAGAGSGAGAGSGAGAGSGAGAGSGAGAGSGAGAGSGAGAGSGAGAGSGAGAGSGAGAGSGAGAGSGAGAGSGAGAGSGAGAGSGAGAGSGAGAGSGAGAGSGAGAGSGAGAGSGAGAGSGAGAGSGAGAGSGAGAGSGAGAGSGAGAGSGAGAGSGAGAGSGAGAGSGAGAGSGAGAGSGAGAGSGAGAGSGAGAGSGAGAGSGAGAGSGAGAGSGAGAGSGAGAGSGAGAGSGAGAGSGAGAGSGAGAGSGAGAGSGAGAGSGAGAGSGAGAGSGAGAGSGAGAGSGAGAGSGAGAGSGAGAGSGAGAGSGAGAGSGAGAGSGAGAGSGAGAGSGAGAGSGAGAGSGAGAGSGAGAGSGAGAGSGAGAGSGAGAGSGAGAGSGAGAGSGAGAGSGAGAGSGAGAGSGAGAGSGAGAGSGAGAGSGAGAGSGAGAGSGAGAGSGAGAGSGAGAGSGAGAGSGAGAGSGAGAGSGAGAGSGAGAGSGAGAGSGAGAGSGAGAGSGAGAGSGAGAGSGAGAGSGAGAGSGAGAGSGAGAGSGAGAGSGAGAGSGAGAGSGAGAGSGAGAGSGAGAGSGAGAGSGAGAGSGAGAGSGAGAGSGAGAGSGAGAGSGAGAGSGAGAGSGAGAGSGAGAGSGAGAGSGAGAGSGAGAGSGAGAGSGAGAGSGAGAGSGAGAGSGAGAGSGAGAGSGAGAGSGAGAGSGAGAGSGAGAGSGAGAGSGAGAGSGAGAGSGAGAGSGAGAGSGAGAGSGAGAGSGAGAGSGAGAGSGAGAGSGAGAGSGAGAGSGAGAGSGAGAGSGAGAGSGAGAGSGAGAGSGAGAGSGAGAGSGAGAGSGAGAGSGAGAGSGAGAGSGAGAGSGAGAGSGAGAGSGAGAGSGAGAGSGAGAGSGAGAGSGAGAGSGAGAGSGAGAGSGAGAGSGAGAGSGAGAGSGAGAGSGVGVPGVGVPGVGVPGVGVPGVGVPGVGVPGVGVPGVGVPGVGVPGVGVPGVGVPGVGVPGVGVPGVGVPGVGVPGVGVPGVGVPGVGVPGVGVPGVGVPGVGVPGVGVPGVGVPGVGVPGVGVPGVGVPGVGVPGVGVPGVGVPGVGVPGVGVPGVGVPGVGVPGVGVPGVGVPGVGVPGVGVPGVGVPGVGVPGVGVPGVGVPGVGVPGVGVPGVGVPGVGVPGVGVPGVGVPGVGVPGVGVPGVGVPGVGVPGVGVPGVGVPGVGVPGVGVPGVGVPGVGVPGVGVPGVGVPGVGVPGVGVPGVGVPGVGVPGVGVPGVGVPGVGVPGVGVPGVGVPGVGVPGVGVPGVGVPGVGVPGVGVPGVGVPGVGVPGVGVPGVGVPGVGVPGVGVPGVGVPGVGVPGVGVPGVGVPGVGVPGVGVPGVGVPGVGVPGVGVPGVGVPGVGVPGVGVPGVGVPGVGVPGVGVPGVGVPGVGVPGVGVPGVGVPGVGVPGVGVPGXGVPGVGVPGVGVPGVGVPGVGVPGVGVPGVGVPGVGVPGVGVPGVGVPGVGVPGVGVPGVGVPGVGVPGVGVPGVGVPGVGVPGVGVPGVGVPGVGVPGVGVPGVGVPGVGVPGVGVPGVGVPGVGVPGVGVPGVGVPGVGVPGVGVPGVGVPGVGVPGVGVPGVGVPGVGVPGVGVPGVGVPGVGVPGVGVPGVGVPGVGVPGVGVPGVGVPGVGVPGVGVPGVGVPGVGVPGVGVPGVGVPGVGVPGVGVPGVGVPGVGVPGVGVPGVGVPGVGVPGVGVPGVGVPGVGVPGVGVPGVGVPGVGVPGVGVPGVGVPGVGVPGVGVPGVGVPGVGVPGVGVPGVGVPGVGVPGVGVPGVGVPGVGVPGVGVPGVGVPGVGVPGVGVPGVGVPGVGVPGVGVPGVGVPGVGVPGVGVPGVGVPGVGVPGVGVPGVGVPGVGVPGVGVPGVGVPGVGVPGVGVPGVGVPGVGVPGVGVPGVGVPGVGVPGVGVPGVGVPGVGVPGAGAGSGAGAGSGAGAGSGAGAGSGAGAGSGAGAGSGAGAGSGAGAGSGAGAGSGAGAGSGAGAGSGAGAGSGAGAGSGAGAGSGAGAGSGAGAGSGAGAGSGAGAGSGAGAGSGAGAGSGAGAGSGAGAGSGAGAGSGAGAGSGAGAGSGAGAGSGAGAGSGAGAGSGAGAGSGAGAGSGAGAGSGAGAGSGAGAGSGAGAGSGAGAGSGAGAGSGAGAGSGAGAGSGAGAGSGAGAGSGAGAGSGAGAGSGAGAGSGAGAGSGAGAGSGAGAGSGAGAGSGAGAGSGAGAGSGAGAGSGAGAGSGAGAGSGAGAGSGAGAGSGAGAGSGAGAGSGAGAGSGAGAGSGAGAGSGAGAGSGAGAGSGAGAGSGAGAGSGAGAGSGAGAGSGAGAGSGAGAGSGAGAGSGAGAGSGAGAGSGAGAGSGAGAGSGAGAGSGAGAGSGAGAGSGAGAGSGAGAGSGAGAGSGAGAGSGAGAGSGAGAGSGAGAGSGAGAGSGAGAGSGAGAGSGAGAGSGAGAGSGAGAGSGAGAGSGAGAGSGAGAGSGAGAGSGAGAGSGAGAGSGAGAGSGAGAGSGAGAGSGAGAGSGAGAGSGAGAGSGAGAGSGAGAGSGAGAGSGAGAGSGAGAGSGAGAGSGAGAGSGAGAGSGAGAGSGAGAGSGAGAGSGAGAGSGAGAGSGAGAGSGAGAGSGAGAGSGAGAGSGAGAGSGAGAGSGAGAGSGAGAGSGAGAGSGAGAGSGAGAGSGAGAGSGAGAGSGAGAGSGAGAGSGAGAGSGAGAGSGAGAGSGAGAGSGAGAGSGAGAGSGAGAGSGAGAGSGAGAGSGAGAGSGAGAGSGAGAGSGAGAGSGAGAGSGAGAGSGAGAGSGAGAGSGAGAGSGAGAGSGAGAGSGAGAGSGAGAGSGAGAGSGAGAGSGAGAGSGAGAGSGAGAGSGAGAGSGAGAGSGAGAGSGAGAGSGAGAGSGAGAGSGAGAGSGAGAGSGAGAGSGAGAGSGAGAGSGAGAGSGAGAGSGAGAGSGAGAGSGAGAGSGAGAGSGAGAGSGAGAGSGAGAGSGAGAGSGAGAGSGAGAGSGAGAGSGAGAGSGAGAGSGAGAGSGAGAGSGAGAGSGAGAGSGAGAGSGAGAGSGAGAGSGAGAGSGAGAGSGAGAGSGAGAGSGAGAGSGAGAGSGAGAGSGAGAGSGAGAGSGAGAGSGAGAGSGAGAGSGAGAGSGVGVPGVGVPGVGVPGVGVPGVGVPGVGVPGVGVPGVGVPGVGVPGVGVPGVGVPGVGVPGVGVPGVGVPGVGVPGVGVPGVGVPGVGVPGVGVPGVGVPGVGVPGVGVPGVGVPGVGVPGVGVPGVGVPGVGVPGVGVPGVGVPGVGVPGVGVPGVGVPGVGVPGVGVPGVGVPGVGVPGVGVPGVGVPGVGVPGVGVPGVGVPGVGVPGVGVPGVGVPGVGVPGVGVPGVGVPGVGVPGVGVPGVGVPGVGVPGVGVPGVGVPGVGVPGVGVPGVGVPGVGVPGVGVPGVGVPGVGVPGVGVPGVGVPGVGVPGVGVPGVGVPGVGVPGVGVPGVGVPGVGVPGVGVPGVGVPGVGVPGVGVPGVGVPGVGVPGVGVPGVGVPGVGVPGVGVPGVGVPGVGVPGVGVPGVGVPGVGVPGVGVPGVGVPGVGVPGVGVPGVGVPGVGVPGVGVPGVGVPGVGVPGVGVPGVGVPGVGVPGVGVPGVGVPGVGVPGVGVPGXGVPGVGVPGVGVPGVGVPGVGVPGVGVPGVGVPGVGVPGVGVPGVGVPGVGVPGVGVPGVGVPGVGVPGVGVPGVGVPGVGVPGVGVPGVGVPGVGVPGVGVPGVGVPGVGVPGVGVPGVGVPGVGVPGVGVPGVGVPGVGVPGVGVPGVGVPGVGVPGVGVPGVGVPGVGVPGVGVPGVGVPGVGVPGVGVPGVGVPGVGVPGVGVPGVGVPGVGVPGVGVPGVGVPGVGVPGVGVPGVGVPGVGVPGVGVPGVGVPGVGVPGVGVPGVGVPGVGVPGVGVPGVGVPGVGVPGVGVPGVGVPGVGVPGVGVPGVGVPGVGVPGVGVPGVGVPGVGVPGVGVPGVGVPGVGVPGVGVPGVGVPGVGVPGVGVPGVGVPGVGVPGVGVPGVGVPGVGVPGVGVPGVGVPGVGVPGVGVPGVGVPGVGVPGVGVPGVGVPGVGVPGVGVPGVGVPGVGVPGVGVPGVGVPGVGVPGVGVPGVGVPGVGVPGVGVPGVGVPGVGVPGAGAGSGAGAGSGAGAGSGAGAGSGAGAGSGAGAGSGAGAGSGAGAGSGAGAGSGAGAGSGAGAGSGAGAGSGAGAGSGAGAGSGAGAGSGAGAGSGAGAGSGAGAGSGAGAGSGAGAGSGAGAGSGAGAGSGAGAGSGAGAGSGAGAGSGAGAGSGAGAGSGAGAGSGAGAGSGAGAGSGAGAGSGAGAGSGAGAGSGAGAGSGAGAGSGAGAGSGAGAGSGAGAGSGAGAGSGAGAGSGAGAGSGAGAGSGAGAGSGAGAGSGAGAGSGAGAGSGAGAGSGAGAGSGAGAGSGAGAGSGAGAGSGAGAGSGAGAGSGAGAGSGAGAGSGAGAGSGAGAGSGAGAGSGAGAGSGAGAGSGAGAGSGAGAGSGAGAGSGAGAGSGAGAGSGAGAGSGAGAGSGAGAGSGAGAGSGAGAGSGAGAGSGAGAGSGAGAGSGAGAGSGAGAGSGAGAGSGAGAGSGAGAGSGAGAGSGAGAGSGAGAGSGAGAGSGAGAGSGAGAGSGAGAGSGAGAGSGAGAGSGAGAGSGAGAGSGAGAGSGAGAGSGAGAGSGAGAGSGAGAGSGAGAGSGAGAGSGAGAGSGAGAGSGAGAGSGAGAGSGAGAGSGAGAGSGAGAGSGAGAGSGAGAGSGAGAGSGAGAGSGAGAGSGAGAGSGAGAGSGAGAGSGAGAGSGAGAGSGAGAGSGAGAGSGAGAGSGAGAGSGAGAGSGAGAGSGAGAGSGAGAGSGAGAGSGAGAGSGAGAGSGAGAGSGAGAGSGAGAGSGAGAGSGAGAGSGAGAGSGAGAGSGAGAGSGAGAGSGAGAGSGAGAGSGAGAGSGAGAGSGAGAGSGAGAGSGAGAGSGAGAGSGAGAGSGAGAGSGAGAGSGAGAGSGAGAGSGAGAGSGAGAGSGAGAGSGAGAGSGAGAGSGAGAGSGAGAGSGAGAGSGAGAGSGAGAGSGAGAGSGAGAGSGAGAGSGAGAGSGAGAGSGAGAGSGAGAGSGAGAGSGAGAGSGAGAGSGAGAGSGAGAGSGAGAGSGAGAGSGAGAGSGAGAGSGAGAGSGAGAGSGAGAGSGAGAGSGAGAGSGAGAGSGAGAGSGAGAGSGAGAGSGAGAGSGAGAGSGAGAGSGAGAGSGAGAGSGAGAGSGAGAGSGAGAGSGAGAGSGAGAGSGAGAGSGAGAGSGAGAGSGAGAGSGAGAGSGAGAGSGAGAGSGAGAGSGAGAGSGAGAGSGVGVPGVGVPGVGVPGVGVPGVGVPGVGVPGVGVPGVGVPGVGVPGVGVPGVGVPGVGVPGVGVPGVGVPGVGVPGVGVPGVGVPGVGVPGVGVPGVGVPGVGVPGVGVPGVGVPGVGVPGVGVPGVGVPGVGVPGVGVPGVGVPGVGVPGVGVPGVGVPGVGVPGVGVPGVGVPGVGVPGVGVPGVGVPGVGVPGVGVPGVGVPGVGVPGVGVPGVGVPGVGVPGVGVPGVGVPGVGVPGVGVPGVGVPGVGVPGVGVPGVGVPGVGVPGVGVPGVGVPGVGVPGVGVPGVGVPGVGVPGVGVPGVGVPGVGVPGVGVPGVGVPGVGVPGVGVPGVGVPGVGVPGVGVPGVGVPGVGVPGVGVPGVGVPGVGVPGVGVPGVGVPGVGVPGVGVPGVGVPGVGVPGVGVPGVGVPGVGVPGVGVPGVGVPGVGVPGVGVPGVGVPGVGVPGVGVPGVGVPGVGVPGVGVPGVGVPGVGVPGVGVPGVGVPGVGVPGVGVPGXGVPGVGVPGVGVPGVGVPGVGVPGVGVPGVGVPGVGVPGVGVPGVGVPGVGVPGVGVPGVGVPGVGVPGVGVPGVGVPGVGVPGVGVPGVGVPGVGVPGVGVPGVGVPGVGVPGVGVPGVGVPGVGVPGVGVPGVGVPGVGVPGVGVPGVGVPGVGVPGVGVPGVGVPGVGVPGVGVPGVGVPGVGVPGVGVPGVGVPGVGVPGVGVPGVGVPGVGVPGVGVPGVGVPGVGVPGVGVPGVGVPGVGVPGVGVPGVGVPGVGVPGVGVPGVGVPGVGVPGVGVPGVGVPGVGVPGVGVPGVGVPGVGVPGVGVPGVGVPGVGVPGVGVPGVGVPGVGVPGVGVPGVGVPGVGVPGVGVPGVGVPGVGVPGVGVPGVGVPGVGVPGVGVPGVGVPGVGVPGVGVPGVGVPGVGVPGVGVPGVGVPGVGVPGVGVPGVGVPGVGVPGVGVPGVGVPGVGVPGVGVPGVGVPGVGVPGVGVPGVGVPGVGVPGVGVPGVGVPGVGVPGAGAGSGAGAGSGAGAGSGAGAGSGAGAGSGAGAGSGAGAGSGAGAGSGAGAGSGAGAGSGAGAGSGAGAGSGAGAGSGAGAGSGAGAGSGAGAGSGAGAGSGAGAGSGAGAGSGAGAGSGAGAGSGAGAGSGAGAGSGAGAGSGAGAGSGAGAGSGAGAGSGAGAGSGAGAGSGAGAGSGAGAGSGAGAGSGAGAGSGAGAGSGAGAGSGAGAGSGAGAGSGAGAGSGAGAGSGAGAGSGAGAGSGAGAGSGAGAGSGAGAGSGAGAGSGAGAGSGAGAGSGAGAGSGAGAGSGAGAGSGAGAGSGAGAGSGAGAGSGAGAGSGAGAGSGAGAGSGAGAGSGAGAGSGAGAGSGAGAGSGAGAGSGAGAGSGAGAGSGAGAGSGAGAGSGAGAGSGAGAGSGAGAGSGAGAGSGAGAGSGAGAGSGAGAGSGAGAGSGAGAGSGAGAGSGAGAGSGAGAGSGAGAGSGAGAGSGAGAGSGAGAGSGAGAGSGAGAGSGAGAGSGAGAGSGAGAGSGAGAGSGAGAGSGAGAGSGAGAGSGAGAGSGAGAGSGAGAGSGAGAGSGAGAGSGAGAGSGAGAGSGAGAGSGAGAGSGAGAGSGAGAGSGAGAGSGAGAGSGAGAGSGAGAGSGAGAGSGAGAGSGAGAGSGAGAGSGAGAGSGAGAGSGAGAGSGAGAGSGAGAGSGAGAGSGAGAGSGAGAGSGAGAGSGAGAGSGAGAGSGAGAGSGAGAGSGAGAGSGAGAGSGAGAGSGAGAGSGAGAGSGAGAGSGAGAGSGAGAGSGAGAGSGAGAGSGAGAGSGAGAGSGAGAGSGAGAGSGAGAGSGAGAGSGAGAGSGAGAGSGAGAGSGAGAGSGAGAGSGAGAGSGAGAGSGAGAGSGAGAGSGAGAGSGAGAGSGAGAGSGAGAGSGAGAGSGAGAGSGAGAGSGAGAGSGAGAGSGAGAGSGAGAGSGAGAGSGAGAGSGAGAGSGAGAGSGAGAGSGAGAGSGAGAGSGAGAGSGAGAGSGAGAGSGAGAGSGAGAGSGAGAGSGAGAGSGAGAGSGAGAGSGAGAGSGAGAGSGAGAGSGAGAGSGAGAGSGAGAGSGAGAGSGAGAGSGAGAGSGAGAGSGAGAGSGAGAGSGAGAGSGAGAGSGAGAGSGAGAGSGAGAGSGAGAGSGAGAGSGAGAGSGAGAGSGAGAGSGAGAGSGAGAGSGAGAGSGAGAGSGAGAGSGVGVPGVGVPGVGVPGVGVPGVGVPGVGVPGVGVPGVGVPGVGVPGVGVPGVGVPGVGVPGVGVPGVGVPGVGVPGVGVPGVGVPGVGVPGVGVPGVGVPGVGVPGVGVPGVGVPGVGVPGVGVPGVGVPGVGVPGVGVPGVGVPGVGVPGVGVPGVGVPGVGVPGVGVPGVGVPGVGVPGVGVPGVGVPGVGVPGVGVPGVGVPGVGVPGVGVPGVGVPGVGVPGVGVPGVGVPGVGVPGVGVPGVGVPGVGVPGVGVPGVGVPGVGVPGVGVPGVGVPGVGVPGVGVPGVGVPGVGVPGVGVPGVGVPGVGVPGVGVPGVGVPGVGVPGVGVPGVGVPGVGVPGVGVPGVGVPGVGVPGVGVPGVGVPGVGVPGVGVPGVGVPGVGVPGVGVPGVGVPGVGVPGVGVPGVGVPGVGVPGVGVPGVGVPGVGVPGVGVPGVGVPGVGVPGVGVPGVGVPGVGVPGVGVPGVGVPGVGVPGVGVPGVGVPGVGVPGVGVPGXGVPGVGVPGVGVPGVGVPGVGVPGVGVPGVGVPGVGVPGVGVPGVGVPGVGVPGVGVPGVGVPGVGVPGVGVPGVGVPGVGVPGVGVPGVGVPGVGVPGVGVPGVGVPGVGVPGVGVPGVGVPGVGVPGVGVPGVGVPGVGVPGVGVPGVGVPGVGVPGVGVPGVGVPGVGVPGVGVPGVGVPGVGVPGVGVPGVGVPGVGVPGVGVPGVGVPGVGVPGVGVPGVGVPGVGVPGVGVPGVGVPGVGVPGVGVPGVGVPGVGVPGVGVPGVGVPGVGVPGVGVPGVGVPGVGVPGVGVPGVGVPGVGVPGVGVPGVGVPGVGVPGVGVPGVGVPGVGVPGVGVPGVGVPGVGVPGVGVPGVGVPGVGVPGVGVPGVGVPGVGVPGVGVPGVGVPGVGVPGVGVPGVGVPGVGVPGVGVPGVGVPGVGVPGVGVPGVGVPGVGVPGVGVPGVGVPGVGVPGVGVPGVGVPGVGVPGVGVPGVGVPGVGVPGVGVPGVGVPGVGVPGAGAGSGAGAGSGAGAGSGAGAGSGAGAGSGAGAGSGAGAGSGAGAGSGAGAGSGAGAGSGAGAGSGAGAGSGAGAGSGAGAGSGAGAGSGAGAGSGAGAGSGAGAGSGAGAGSGAGAGSGAGAGSGAGAGSGAGAGSGAGAGSGAGAGSGAGAGSGAGAGSGAGAGSGAGAGSGAGAGSGAGAGSGAGAGSGAGAGSGAGAGSGAGAGSGAGAGSGAGAGSGAGAGSGAGAGSGAGAGSGAGAGSGAGAGSGAGAGSGAGAGSGAGAGSGAGAGSGAGAGSGAGAGSGAGAGSGAGAGSGAGAGSGAGAGSGAGAGSGAGAGSGAGAGSGAGAGSGAGAGSGAGAGSGAGAGSGAGAGSGAGAGSGAGAGSGAGAGSGAGAGSGAGAGSGAGAGSGAGAGSGAGAGSGAGAGSGAGAGSGAGAGSGAGAGSGAGAGSGAGAGSGAGAGSGAGAGSGAGAGSGAGAGSGAGAGSGAGAGSGAGAGSGAGAGSGAGAGSGAGAGSGAGAGSGAGAGSGAGAGSGAGAGSGAGAGSGAGAGSGAGAGSGAGAGSGAGAGSGAGAGSGAGAGSGAGAGSGAGAGSGAGAGSGAGAGSGAGAGSGAGAGSGAGAGSGAGAGSGAGAGSGAGAGSGAGAGSGAGAGSGAGAGSGAGAGSGAGAGSGAGAGSGAGAGSGAGAGSGAGAGSGAGAGSGAGAGSGAGAGSGAGAGSGAGAGSGAGAGSGAGAGSGAGAGSGAGAGSGAGAGSGAGAGSGAGAGSGAGAGSGAGAGSGAGAGSGAGAGSGAGAGSGAGAGSGAGAGSGAGAGSGAGAGSGAGAGSGAGAGSGAGAGSGAGAGSGAGAGSGAGAGSGAGAGSGAGAGSGAGAGSGAGAGSGAGAGSGAGAGSGAGAGSGAGAGSGAGAGSGAGAGSGAGAGSGAGAGSGAGAGSGAGAGSGAGAGSGAGAGSGAGAGSGAGAGSGAGAGSGAGAGSGAGAGSGAGAGSGAGAGSGAGAGSGAGAGSGAGAGSGAGAGSGAGAGSGAGAGSGAGAGSGAGAGSGAGAGSGAGAGSGAGAGSGAGAGSGAGAGSGAGAGSGAGAGSGAGAGSGAGAGSGAGAGSGAGAGSGAGAGSGAGAGSGAGAGSGAGAGSGAGAGSGAGAGSGAGAGSGAGAGSGAGAGSGAGAGSGAGAGSGAGAGSGAGAGSGAGAGSGAGAGSGAGAGSGAGAGSGAGAGSGVGVPGVGVPGVGVPGVGVPGVGVPGVGVPGVGVPGVGVPGVGVPGVGVPGVGVPGVGVPGVGVPGVGVPGVGVPGVGVPGVGVPGVGVPGVGVPGVGVPGVGVPGVGVPGVGVPGVGVPGVGVPGVGVPGVGVPGVGVPGVGVPGVGVPGVGVPGVGVPGVGVPGVGVPGVGVPGVGVPGVGVPGVGVPGVGVPGVGVPGVGVPGVGVPGVGVPGVGVPGVGVPGVGVPGVGVPGVGVPGVGVPGVGVPGVGVPGVGVPGVGVPGVGVPGVGVPGVGVPGVGVPGVGVPGVGVPGVGVPGVGVPGVGVPGVGVPGVGVPGVGVPGVGVPGVGVPGVGVPGVGVPGVGVPGVGVPGVGVPGVGVPGVGVPGVGVPGVGVPGVGVPGVGVPGVGVPGVGVPGVGVPGVGVPGVGVPGVGVPGVGVPGVGVPGVGVPGVGVPGVGVPGVGVPGVGVPGVGVPGVGVPGVGVPGVGVPGVGVPGVGVPGVGVPGVGVPGVGVPGXGVPGVGVPGVGVPGVGVPGVGVPGVGVPGVGVPGVGVPGVGVPGVGVPGVGVPGVGVPGVGVPGVGVPGVGVPGVGVPGVGVPGVGVPGVGVPGVGVPGVGVPGVGVPGVGVPGVGVPGVGVPGVGVPGVGVPGVGVPGVGVPGVGVPGVGVPGVGVPGVGVPGVGVPGVGVPGVGVPGVGVPGVGVPGVGVPGVGVPGVGVPGVGVPGVGVPGVGVPGVGVPGVGVPGVGVPGVGVPGVGVPGVGVPGVGVPGVGVPGVGVPGVGVPGVGVPGVGVPGVGVPGVGVPGVGVPGVGVPGVGVPGVGVPGVGVPGVGVPGVGVPGVGVPGVGVPGVGVPGVGVPGVGVPGVGVPGVGVPGVGVPGVGVPGVGVPGVGVPGVGVPGVGVPGVGVPGVGVPGVGVPGVGVPGVGVPGVGVPGVGVPGVGVPGVGVPGVGVPGVGVPGVGVPGVGVPGVGVPGVGVPGVGVPGVGVPGVGVPGVGVPGVGVPGVGVPGVGVPGVGVPGAGAGSGAGAGSGAGAGSGAGAGSGAGAGSGAGAGSGAGAGSGAGAGSGAGAGSGAGAGSGAGAGSGAGAGSGAGAGSGAGAGSGAGAGSGAGAGSGAGAGSGAGAGSGAGAGSGAGAGSGAGAGSGAGAGSGAGAGSGAGAGSGAGAGSGAGAGSGAGAGSGAGAGSGAGAGSGAGAGSGAGAGSGAGAGSGAGAGSGAGAGSGAGAGSGAGAGSGAGAGSGAGAGSGAGAGSGAGAGSGAGAGSGAGAGSGAGAGSGAGAGSGAGAGSGAGAGSGAGAGSGAGAGSGAGAGSGAGAGSGAGAGSGAGAGSGAGAGSGAGAGSGAGAGSGAGAGSGAGAGSGAGAGSGAGAGSGAGAGSGAGAGSGAGAGSGAGAGSGAGAGSGAGAGSGAGAGSGAGAGSGAGAGSGAGAGSGAGAGSGAGAGSGAGAGSGAGAGSGAGAGSGAGAGSGAGAGSGAGAGSGAGAGSGAGAGSGAGAGSGAGAGSGAGAGSGAGAGSGAGAGSGAGAGSGAGAGSGAGAGSGAGAGSGAGAGSGAGAGSGAGAGSGAGAGSGAGAGSGAGAGSGAGAGSGAGAGSGAGAGSGAGAGSGAGAGSGAGAGSGAGAGSGAGAGSGAGAGSGAGAGSGAGAGSGAGAGSGAGAGSGAGAGSGAGAGSGAGAGSGAGAGSGAGAGSGAGAGSGAGAGSGAGAGSGAGAGSGAGAGSGAGAGSGAGAGSGAGAGSGAGAGSGAGAGSGAGAGSGAGAGSGAGAGSGAGAGSGAGAGSGAGAGSGAGAGSGAGAGSGAGAGSGAGAGSGAGAGSGAGAGSGAGAGSGAGAGSGAGAGSGAGAGSGAGAGSGAGAGSGAGAGSGAGAGSGAGAGSGAGAGSGAGAGSGAGAGSGAGAGSGAGAGSGAGAGSGAGAGSGAGAGSGAGAGSGAGAGSGAGAGSGAGAGSGAGAGSGAGAGSGAGAGSGAGAGSGAGAGSGAGAGSGAGAGSGAGAGSGAGAGSGAGAGSGAGAGSGAGAGSGAGAGSGAGAGSGAGAGSGAGAGSGAGAGSGAGAGSGAGAGSGAGAGSGAGAGSGAGAGSGAGAGSGAGAGSGAGAGSGAGAGSGAGAGSGAGAGSGAGAGSGAGAGSGAGAGSGAGAGSGAGAGSGAGAGSGAGAGSGAGAGSGAGAGSGAGAGSGAGAGSGAGAGSGAGAGSGAGAGSGAGAGSGAGAGSGAGAGSGAGAGSGVGVPGVGVPGVGVPGVGVPGVGVPGVGVPGVGVPGVGVPGVGVPGVGVPGVGVPGVGVPGVGVPGVGVPGVGVPGVGVPGVGVPGVGVPGVGVPGVGVPGVGVPGVGVPGVGVPGVGVPGVGVPGVGVPGVGVPGVGVPGVGVPGVGVPGVGVPGVGVPGVGVPGVGVPGVGVPGVGVPGVGVPGVGVPGVGVPGVGVPGVGVPGVGVPGVGVPGVGVPGVGVPGVGVPGVGVPGVGVPGVGVPGVGVPGVGVPGVGVPGVGVPGVGVPGVGVPGVGVPGVGVPGVGVPGVGVPGVGVPGVGVPGVGVPGVGVPGVGVPGVGVPGVGVPGVGVPGVGVPGVGVPGVGVPGVGVPGVGVPGVGVPGVGVPGVGVPGVGVPGVGVPGVGVPGVGVPGVGVPGVGVPGVGVPGVGVPGVGVPGVGVPGVGVPGVGVPGVGVPGVGVPGVGVPGVGVPGVGVPGVGVPGVGVPGVGVPGVGVPGVGVPGVGVPGVGVPGVGVPGXGVPGVGVPGVGVPGVGVPGVGVPGVGVPGVGVPGVGVPGVGVPGVGVPGVGVPGVGVPGVGVPGVGVPGVGVPGVGVPGVGVPGVGVPGVGVPGVGVPGVGVPGVGVPGVGVPGVGVPGVGVPGVGVPGVGVPGVGVPGVGVPGVGVPGVGVPGVGVPGVGVPGVGVPGVGVPGVGVPGVGVPGVGVPGVGVPGVGVPGVGVPGVGVPGVGVPGVGVPGVGVPGVGVPGVGVPGVGVPGVGVPGVGVPGVGVPGVGVPGVGVPGVGVPGVGVPGVGVPGVGVPGVGVPGVGVPGVGVPGVGVPGVGVPGVGVPGVGVPGVGVPGVGVPGVGVPGVGVPGVGVPGVGVPGVGVPGVGVPGVGVPGVGVPGVGVPGVGVPGVGVPGVGVPGVGVPGVGVPGVGVPGVGVPGVGVPGVGVPGVGVPGVGVPGVGVPGVGVPGVGVPGVGVPGVGVPGVGVPGVGVPGVGVPGVGVPGVGVPGVGVPGVGVPGVGVPGVGVPGVGVPGAGAGSGAGAGSGAGAGSGAGAGSGAGAGSGAGAGSGAGAGSGAGAGSGAGAGSGAGAGSGAGAGSGAGAGSGAGAGSGAGAGSGAGAGSGAGAGSGAGAGSGAGAGSGAGAGSGAGAGSGAGAGSGAGAGSGAGAGSGAGAGSGAGAGSGAGAGSGAGAGSGAGAGSGAGAGSGAGAGSGAGAGSGAGAGSGAGAGSGAGAGSGAGAGSGAGAGSGAGAGSGAGAGSGAGAGSGAGAGSGAGAGSGAGAGSGAGAGSGAGAGSGAGAGSGAGAGSGAGAGSGAGAGSGAGAGSGAGAGSGAGAGSGAGAGSGAGAGSGAGAGSGAGAGSGAGAGSGAGAGSGAGAGSGAGAGSGAGAGSGAGAGSGAGAGSGAGAGSGAGAGSGAGAGSGAGAGSGAGAGSGAGAGSGAGAGSGAGAGSGAGAGSGAGAGSGAGAGSGAGAGSGAGAGSGAGAGSGAGAGSGAGAGSGAGAGSGAGAGSGAGAGSGAGAGSGAGAGSGAGAGSGAGAGSGAGAGSGAGAGSGAGAGSGAGAGSGAGAGSGAGAGSGAGAGSGAGAGSGAGAGSGAGAGSGAGAGSGAGAGSGAGAGSGAGAGSGAGAGSGAGAGSGAGAGSGAGAGSGAGAGSGAGAGSGAGAGSGAGAGSGAGAGSGAGAGSGAGAGSGAGAGSGAGAGSGAGAGSGAGAGSGAGAGSGAGAGSGAGAGSGAGAGSGAGAGSGAGAGSGAGAGSGAGAGSGAGAGSGAGAGSGAGAGSGAGAGSGAGAGSGAGAGSGAGAGSGAGAGSGAGAGSGAGAGSGAGAGSGAGAGSGAGAGSGAGAGSGAGAGSGAGAGSGAGAGSGAGAGSGAGAGSGAGAGSGAGAGSGAGAGSGAGAGSGAGAGSGAGAGSGAGAGSGAGAGSGAGAGSGAGAGSGAGAGSGAGAGSGAGAGSGAGAGSGAGAGSGAGAGSGAGAGSGAGAGSGAGAGSGAGAGSGAGAGSGAGAGSGAGAGSGAGAGSGAGAGSGAGAGSGAGAGSGAGAGSGAGAGSGAGAGSGAGAGSGAGAGSGAGAGSGAGAGSGAGAGSGAGAGSGAGAGSGAGAGSGAGAGSGAGAGSGAGAGSGAGAGSGAGAGSGAGAGSGAGAGSGAGAGSGAGAGSGAGAGSGAGAGSGAGAGSGAGAGSGAGAGSGAGAGSGAGAGSGAGAGSGAGAGSGAGAGSGAGAGSGAGAGSGAGAGSGVGVPGVGVPGVGVPGVGVPGVGVPGVGVPGVGVPGVGVPGVGVPGVGVPGVGVPGVGVPGVGVPGVGVPGVGVPGVGVPGVGVPGVGVPGVGVPGVGVPGVGVPGVGVPGVGVPGVGVPGVGVPGVGVPGVGVPGVGVPGVGVPGVGVPGVGVPGVGVPGVGVPGVGVPGVGVPGVGVPGVGVPGVGVPGVGVPGVGVPGVGVPGVGVPGVGVPGVGVPGVGVPGVGVPGVGVPGVGVPGVGVPGVGVPGVGVPGVGVPGVGVPGVGVPGVGVPGVGVPGVGVPGVGVPGVGVPGVGVPGVGVPGVGVPGVGVPGVGVPGVGVPGVGVPGVGVPGVGVPGVGVPGVGVPGVGVPGVGVPGVGVPGVGVPGVGVPGVGVPGVGVPGVGVPGVGVPGVGVPGVGVPGVGVPGVGVPGVGVPGVGVPGVGVPGVGVPGVGVPGVGVPGVGVPGVGVPGVGVPGVGVPGVGVPGVGVPGVGVPGVGVPGVGVPGVGVPGVGVPGXGVPGVGVPGVGVPGVGVPGVGVPGVGVPGVGVPGVGVPGVGVPGVGVPGVGVPGVGVPGVGVPGVGVPGVGVPGVGVPGVGVPGVGVPGVGVPGVGVPGVGVPGVGVPGVGVPGVGVPGVGVPGVGVPGVGVPGVGVPGVGVPGVGVPGVGVPGVGVPGVGVPGVGVPGVGVPGVGVPGVGVPGVGVPGVGVPGVGVPGVGVPGVGVPGVGVPGVGVPGVGVPGVGVPGVGVPGVGVPGVGVPGVGVPGVGVPGVGVPGVGVPGVGVPGVGVPGVGVPGVGVPGVGVPGVGVPGVGVPGVGVPGVGVPGVGVPGVGVPGVGVPGVGVPGVGVPGVGVPGVGVPGVGVPGVGVPGVGVPGVGVPGVGVPGVGVPGVGVPGVGVPGVGVPGVGVPGVGVPGVGVPGVGVPGVGVPGVGVPGVGVPGVGVPGVGVPGVGVPGVGVPGVGVPGVGVPGVGVPGVGVPGVGVPGVGVPGVGVPGVGVPGVGVPGVGVPGVGVPGVGVPGAGAGSGAGAGSGAGAGSGAGAGSGAGAGSGAGAGSGAGAGSGAGAGSGAGAGSGAGAGSGAGAGSGAGAGSGAGAGSGAGAGSGAGAGSGAGAGSGAGAGSGAGAGSGAGAGSGAGAGSGAGAGSGAGAGSGAGAGSGAGAGSGAGAGSGAGAGSGAGAGSGAGAGSGAGAGSGAGAGSGAGAGSGAGAGSGAGAGSGAGAGSGAGAGSGAGAGSGAGAGSGAGAGSGAGAGSGAGAGSGAGAGSGAGAGSGAGAGSGAGAGSGAGAGSGAGAGSGAGAGSGAGAGSGAGAGSGAGAGSGAGAGSGAGAGSGAGAGSGAGAGSGAGAGSGAGAGSGAGAGSGAGAGSGAGAGSGAGAGSGAGAGSGAGAGSGAGAGSGAGAGSGAGAGSGAGAGSGAGAGSGAGAGSGAGAGSGAGAGSGAGAGSGAGAGSGAGAGSGAGAGSGAGAGSGAGAGSGAGAGSGAGAGSGAGAGSGAGAGSGAGAGSGAGAGSGAGAGSGAGAGSGAGAGSGAGAGSGAGAGSGAGAGSGAGAGSGAGAGSGAGAGSGAGAGSGAGAGSGAGAGSGAGAGSGAGAGSGAGAGSGAGAGSGAGAGSGAGAGSGAGAGSGAGAGSGAGAGSGAGAGSGAGAGSGAGAGSGAGAGSGAGAGSGAGAGSGAGAGSGAGAGSGAGAGSGAGAGSGAGAGSGAGAGSGAGAGSGAGAGSGAGAGSGAGAGSGAGAGSGAGAGSGAGAGSGAGAGSGAGAGSGAGAGSGAGAGSGAGAGSGAGAGSGAGAGSGAGAGSGAGAGSGAGAGSGAGAGSGAGAGSGAGAGSGAGAGSGAGAGSGAGAGSGAGAGSGAGAGSGAGAGSGAGAGSGAGAGSGAGAGSGAGAGSGAGAGSGAGAGSGAGAGSGAGAGSGAGAGSGAGAGSGAGAGSGAGAGSGAGAGSGAGAGSGAGAGSGAGAGSGAGAGSGAGAGSGAGAGSGAGAGSGAGAGSGAGAGSGAGAGSGAGAGSGAGAGSGAGAGSGAGAGSGAGAGSGAGAGSGAGAGSGAGAGSGAGAGSGAGAGSGAGAGSGAGAGSGAGAGSGAGAGSGAGAGSGAGAGSGAGAGSGAGAGSGAGAGSGAGAGSGAGAGSGAGAGSGAGAGSGAGAGSGAGAGSGAGAGSGAGAGSGAGAGSGAGAGSGAGAGSGAGAGSGAGAGSGAGAGSGAGAGSGAGAGSGAGAGSGAGAGSGVGVPGVGVPGVGVPGVGVPGVGVPGVGVPGVGVPGVGVPGVGVPGVGVPGVGVPGVGVPGVGVPGVGVPGVGVPGVGVPGVGVPGVGVPGVGVPGVGVPGVGVPGVGVPGVGVPGVGVPGVGVPGVGVPGVGVPGVGVPGVGVPGVGVPGVGVPGVGVPGVGVPGVGVPGVGVPGVGVPGVGVPGVGVPGVGVPGVGVPGVGVPGVGVPGVGVPGVGVPGVGVPGVGVPGVGVPGVGVPGVGVPGVGVPGVGVPGVGVPGVGVPGVGVPGVGVPGVGVPGVGVPGVGVPGVGVPGVGVPGVGVPGVGVPGVGVPGVGVPGVGVPGVGVPGVGVPGVGVPGVGVPGVGVPGVGVPGVGVPGVGVPGVGVPGVGVPGVGVPGVGVPGVGVPGVGVPGVGVPGVGVPGVGVPGVGVPGVGVPGVGVPGVGVPGVGVPGVGVPGVGVPGVGVPGVGVPGVGVPGVGVPGVGVPGVGVPGVGVPGVGVPGVGVPGVGVPGVGVPGXGVPGVGVPGVGVPGVGVPGVGVPGVGVPGVGVPGVGVPGVGVPGVGVPGVGVPGVGVPGVGVPGVGVPGVGVPGVGVPGVGVPGVGVPGVGVPGVGVPGVGVPGVGVPGVGVPGVGVPGVGVPGVGVPGVGVPGVGVPGVGVPGVGVPGVGVPGVGVPGVGVPGVGVPGVGVPGVGVPGVGVPGVGVPGVGVPGVGVPGVGVPGVGVPGVGVPGVGVPGVGVPGVGVPGVGVPGVGVPGVGVPGVGVPGVGVPGVGVPGVGVPGVGVPGVGVPGVGVPGVGVPGVGVPGVGVPGVGVPGVGVPGVGVPGVGVPGVGVPGVGVPGVGVPGVGVPGVGVPGVGVPGVGVPGVGVPGVGVPGVGVPGVGVPGVGVPGVGVPGVGVPGVGVPGVGVPGVGVPGVGVPGVGVPGVGVPGVGVPGVGVPGVGVPGVGVPGVGVPGVGVPGVGVPGVGVPGVGVPGVGVPGVGVPGVGVPGVGVPGVGVPGVGVPGVGVPGVGVPGVGVPGAGAGSGAGAGSGAGAGSGAGAGSGAGAGSGAGAGSGAGAGSGAGAGSGAGAGSGAGAGSGAGAGSGAGAGSGAGAGSGAGAGSGAGAGSGAGAGSGAGAGSGAGAGSGAGAGSGAGAGSGAGAGSGAGAGSGAGAGSGAGAGSGAGAGSGAGAGSGAGAGSGAGAGSGAGAGSGAGAGSGAGAGSGAGAGSGAGAGSGAGAGSGAGAGSGAGAGSGAGAGSGAGAGSGAGAGSGAGAGSGAGAGSGAGAGSGAGAGSGAGAGSGAGAGSGAGAGSGAGAGSGAGAGSGAGAGSGAGAGSGAGAGSGAGAGSGAGAGSGAGAGSGAGAGSGAGAGSGAGAGSGAGAGSGAGAGSGAGAGSGAGAGSGAGAGSGAGAGSGAGAGSGAGAGSGAGAGSGAGAGSGAGAGSGAGAGSGAGAGSGAGAGSGAGAGSGAGAGSGAGAGSGAGAGSGAGAGSGAGAGSGAGAGSGAGAGSGAGAGSGAGAGSGAGAGSGAGAGSGAGAGSGAGAGSGAGAGSGAGAGSGAGAGSGAGAGSGAGAGSGAGAGSGAGAGSGAGAGSGAGAGSGAGAGSGAGAGSGAGAGSGAGAGSGAGAGSGAGAGSGAGAGSGAGAGSGAGAGSGAGAGSGAGAGSGAGAGSGAGAGSGAGAGSGAGAGSGAGAGSGAGAGSGAGAGSGAGAGSGAGAGSGAGAGSGAGAGSGAGAGSGAGAGSGAGAGSGAGAGSGAGAGSGAGAGSGAGAGSGAGAGSGAGAGSGAGAGSGAGAGSGAGAGSGAGAGSGAGAGSGAGAGSGAGAGSGAGAGSGAGAGSGAGAGSGAGAGSGAGAGSGAGAGSGAGAGSGAGAGSGAGAGSGAGAGSGAGAGSGAGAGSGAGAGSGAGAGSGAGAGSGAGAGSGAGAGSGAGAGSGAGAGSGAGAGSGAGAGSGAGAGSGAGAGSGAGAGSGAGAGSGAGAGSGAGAGSGAGAGSGAGAGSGAGAGSGAGAGSGAGAGSGAGAGSGAGAGSGAGAGSGAGAGSGAGAGSGAGAGSGAGAGSGAGAGSGAGAGSGAGAGSGAGAGSGAGAGSGAGAGSGAGAGSGAGAGSGAGAGSGAGAGSGAGAGSGAGAGSGAGAGSGAGAGSGAGAGSGAGAGSGAGAGSGAGAGSGAGAGSGAGAGSGAGAGSGAGAGSGAGAGSGAGAGSGAGAGSGAGAGSGAGAGSGAGAGSGAGAGSGAGAGSGVGVPGVGVPGVGVPGVGVPGVGVPGVGVPGVGVPGVGVPGVGVPGVGVPGVGVPGVGVPGVGVPGVGVPGVGVPGVGVPGVGVPGVGVPGVGVPGVGVPGVGVPGVGVPGVGVPGVGVPGVGVPGVGVPGVGVPGVGVPGVGVPGVGVPGVGVPGVGVPGVGVPGVGVPGVGVPGVGVPGVGVPGVGVPGVGVPGVGVPGVGVPGVGVPGVGVPGVGVPGVGVPGVGVPGVGVPGVGVPGVGVPGVGVPGVGVPGVGVPGVGVPGVGVPGVGVPGVGVPGVGVPGVGVPGVGVPGVGVPGVGVPGVGVPGVGVPGVGVPGVGVPGVGVPGVGVPGVGVPGVGVPGVGVPGVGVPGVGVPGVGVPGVGVPGVGVPGVGVPGVGVPGVGVPGVGVPGVGVPGVGVPGVGVPGVGVPGVGVPGVGVPGVGVPGVGVPGVGVPGVGVPGVGVPGVGVPGVGVPGVGVPGVGVPGVGVPGVGVPGVGVPGVGVPGVGVPGVGVPGXGVPGVGVPGVGVPGVGVPGVGVPGVGVPGVGVPGVGVPGVGVPGVGVPGVGVPGVGVPGVGVPGVGVPGVGVPGVGVPGVGVPGVGVPGVGVPGVGVPGVGVPGVGVPGVGVPGVGVPGVGVPGVGVPGVGVPGVGVPGVGVPGVGVPGVGVPGVGVPGVGVPGVGVPGVGVPGVGVPGVGVPGVGVPGVGVPGVGVPGVGVPGVGVPGVGVPGVGVPGVGVPGVGVPGVGVPGVGVPGVGVPGVGVPGVGVPGVGVPGVGVPGVGVPGVGVPGVGVPGVGVPGVGVPGVGVPGVGVPGVGVPGVGVPGVGVPGVGVPGVGVPGVGVPGVGVPGVGVPGVGVPGVGVPGVGVPGVGVPGVGVPGVGVPGVGVPGVGVPGVGVPGVGVPGVGVPGVGVPGVGVPGVGVPGVGVPGVGVPGVGVPGVGVPGVGVPGVGVPGVGVPGVGVPGVGVPGVGVPGVGVPGVGVPGVGVPGVGVPGVGVPGVGVPGVGVPGVGVPGVGVPGAGAGSGAGAGSGAGAGSGAGAGSGAGAGSGAGAGSGAGAGSGAGAGSGAGAGSGAGAGSGAGAGSGAGAGSGAGAGSGAGAGSGAGAGSGAGAGSGAGAGSGAGAGSGAGAGSGAGAGSGAGAGSGAGAGSGAGAGSGAGAGSGAGAGSGAGAGSGAGAGSGAGAGSGAGAGSGAGAGSGAGAGSGAGAGSGAGAGSGAGAGSGAGAGSGAGAGSGAGAGSGAGAGSGAGAGSGAGAGSGAGAGSGAGAGSGAGAGSGAGAGSGAGAGSGAGAGSGAGAGSGAGAGSGAGAGSGAGAGSGAGAGSGAGAGSGAGAGSGAGAGSGAGAGSGAGAGSGAGAGSGAGAGSGAGAGSGAGAGSGAGAGSGAGAGSGAGAGSGAGAGSGAGAGSGAGAGSGAGAGSGAGAGSGAGAGSGAGAGSGAGAGSGAGAGSGAGAGSGAGAGSGAGAGSGAGAGSGAGAGSGAGAGSGAGAGSGAGAGSGAGAGSGAGAGSGAGAGSGAGAGSGAGAGSGAGAGSGAGAGSGAGAGSGAGAGSGAGAGSGAGAGSGAGAGSGAGAGSGAGAGSGAGAGSGAGAGSGAGAGSGAGAGSGAGAGSGAGAGSGAGAGSGAGAGSGAGAGSGAGAGSGAGAGSGAGAGSGAGAGSGAGAGSGAGAGSGAGAGSGAGAGSGAGAGSGAGAGSGAGAGSGAGAGSGAGAGSGAGAGSGAGAGSGAGAGSGAGAGSGAGAGSGAGAGSGAGAGSGAGAGSGAGAGSGAGAGSGAGAGSGAGAGSGAGAGSGAGAGSGAGAGSGAGAGSGAGAGSGAGAGSGAGAGSGAGAGSGAGAGSGAGAGSGAGAGSGAGAGSGAGAGSGAGAGSGAGAGSGAGAGSGAGAGSGAGAGSGAGAGSGAGAGSGAGAGSGAGAGSGAGAGSGAGAGSGAGAGSGAGAGSGAGAGSGAGAGSGAGAGSGAGAGSGAGAGSGAGAGSGAGAGSGAGAGSGAGAGSGAGAGSGAGAGSGAGAGSGAGAGSGAGAGSGAGAGSGAGAGSGAGAGSGAGAGSGAGAGSGAGAGSGAGAGSGAGAGSGAGAGSGAGAGSGAGAGSGAGAGSGAGAGSGAGAGSGAGAGSGAGAGSGAGAGSGAGAGSGAGAGSGAGAGSGAGAGSGAGAGSGAGAGSGAGAGSGAGAGSGAGAGSGAGAGSGAGAGSGAGAGSGAGAGSGAGAGSGAGAGSGAGAGSGVGVPGVGVPGVGVPGVGVPGVGVPGVGVPGVGVPGVGVPGVGVPGVGVPGVGVPGVGVPGVGVPGVGVPGVGVPGVGVPGVGVPGVGVPGVGVPGVGVPGVGVPGVGVPGVGVPGVGVPGVGVPGVGVPGVGVPGVGVPGVGVPGVGVPGVGVPGVGVPGVGVPGVGVPGVGVPGVGVPGVGVPGVGVPGVGVPGVGVPGVGVPGVGVPGVGVPGVGVPGVGVPGVGVPGVGVPGVGVPGVGVPGVGVPGVGVPGVGVPGVGVPGVGVPGVGVPGVGVPGVGVPGVGVPGVGVPGVGVPGVGVPGVGVPGVGVPGVGVPGVGVPGVGVPGVGVPGVGVPGVGVPGVGVPGVGVPGVGVPGVGVPGVGVPGVGVPGVGVPGVGVPGVGVPGVGVPGVGVPGVGVPGVGVPGVGVPGVGVPGVGVPGVGVPGVGVPGVGVPGVGVPGVGVPGVGVPGVGVPGVGVPGVGVPGVGVPGVGVPGVGVPGVGVPGVGVPGVGVPGXGVPGVGVPGVGVPGVGVPGVGVPGVGVPGVGVPGVGVPGVGVPGVGVPGVGVPGVGVPGVGVPGVGVPGVGVPGVGVPGVGVPGVGVPGVGVPGVGVPGVGVPGVGVPGVGVPGVGVPGVGVPGVGVPGVGVPGVGVPGVGVPGVGVPGVGVPGVGVPGVGVPGVGVPGVGVPGVGVPGVGVPGVGVPGVGVPGVGVPGVGVPGVGVPGVGVPGVGVPGVGVPGVGVPGVGVPGVGVPGVGVPGVGVPGVGVPGVGVPGVGVPGVGVPGVGVPGVGVPGVGVPGVGVPGVGVPGVGVPGVGVPGVGVPGVGVPGVGVPGVGVPGVGVPGVGVPGVGVPGVGVPGVGVPGVGVPGVGVPGVGVPGVGVPGVGVPGVGVPGVGVPGVGVPGVGVPGVGVPGVGVPGVGVPGVGVPGVGVPGVGVPGVGVPGVGVPGVGVPGVGVPGVGVPGVGVPGVGVPGVGVPGVGVPGVGVPGVGVPGVGVPGVGVPGVGVPGVGVPGVGVPGAGAGSGAGAGSGAGAGSGAGAGSGAGAGSGAGAGSGAGAGSGAGAGSGAGAGSGAGAGSGAGAGSGAGAGSGAGAGSGAGAGSGAGAGSGAGAGSGAGAGSGAGAGSGAGAGSGAGAGSGAGAGSGAGAGSGAGAGSGAGAGSGAGAGSGAGAGSGAGAGSGAGAGSGAGAGSGAGAGSGAGAGSGAGAGSGAGAGSGAGAGSGAGAGSGAGAGSGAGAGSGAGAGSGAGAGSGAGAGSGAGAGSGAGAGSGAGAGSGAGAGSGAGAGSGAGAGSGAGAGSGAGAGSGAGAGSGAGAGSGAGAGSGAGAGSGAGAGSGAGAGSGAGAGSGAGAGSGAGAGSGAGAGSGAGAGSGAGAGSGAGAGSGAGAGSGAGAGSGAGAGSGAGAGSGAGAGSGAGAGSGAGAGSGAGAGSGAGAGSGAGAGSGAGAGSGAGAGSGAGAGSGAGAGSGAGAGSGAGAGSGAGAGSGAGAGSGAGAGSGAGAGSGAGAGSGAGAGSGAGAGSGAGAGSGAGAGSGAGAGSGAGAGSGAGAGSGAGAGSGAGAGSGAGAGSGAGAGSGAGAGSGAGAGSGAGAGSGAGAGSGAGAGSGAGAGSGAGAGSGAGAGSGAGAGSGAGAGSGAGAGSGAGAGSGAGAGSGAGAGSGAGAGSGAGAGSGAGAGSGAGAGSGAGAGSGAGAGSGAGAGSGAGAGSGAGAGSGAGAGSGAGAGSGAGAGSGAGAGSGAGAGSGAGAGSGAGAGSGAGAGSGAGAGSGAGAGSGAGAGSGAGAGSGAGAGSGAGAGSGAGAGSGAGAGSGAGAGSGAGAGSGAGAGSGAGAGSGAGAGSGAGAGSGAGAGSGAGAGSGAGAGSGAGAGSGAGAGSGAGAGSGAGAGSGAGAGSGAGAGSGAGAGSGAGAGSGAGAGSGAGAGSGAGAGSGAGAGSGAGAGSGAGAGSGAGAGSGAGAGSGAGAGSGAGAGSGAGAGSGAGAGSGAGAGSGAGAGSGAGAGSGAGAGSGAGAGSGAGAGSGAGAGSGAGAGSGAGAGSGAGAGSGAGAGSGAGAGSGAGAGSGAGAGSGAGAGSGAGAGSGAGAGSGAGAGSGAGAGSGAGAGSGAGAGSGAGAGSGAGAGSGAGAGSGAGAGSGAGAGSGAGAGSGAGAGSGAGAGSGAGAGSGAGAGSGAGAGSGAGAGSGAGAGSGAGAGSGAGAGSGAGAGSGAGAGSGAGAGSGAGAGSGVGVPGVGVPGVGVPGVGVPGVGVPGVGVPGVGVPGVGVPGVGVPGVGVPGVGVPGVGVPGVGVPGVGVPGVGVPGVGVPGVGVPGVGVPGVGVPGVGVPGVGVPGVGVPGVGVPGVGVPGVGVPGVGVPGVGVPGVGVPGVGVPGVGVPGVGVPGVGVPGVGVPGVGVPGVGVPGVGVPGVGVPGVGVPGVGVPGVGVPGVGVPGVGVPGVGVPGVGVPGVGVPGVGVPGVGVPGVGVPGVGVPGVGVPGVGVPGVGVPGVGVPGVGVPGVGVPGVGVPGVGVPGVGVPGVGVPGVGVPGVGVPGVGVPGVGVPGVGVPGVGVPGVGVPGVGVPGVGVPGVGVPGVGVPGVGVPGVGVPGVGVPGVGVPGVGVPGVGVPGVGVPGVGVPGVGVPGVGVPGVGVPGVGVPGVGVPGVGVPGVGVPGVGVPGVGVPGVGVPGVGVPGVGVPGVGVPGVGVPGVGVPGVGVPGVGVPGVGVPGVGVPGVGVPGVGVPGVGVPGXGVPGVGVPGVGVPGVGVPGVGVPGVGVPGVGVPGVGVPGVGVPGVGVPGVGVPGVGVPGVGVPGVGVPGVGVPGVGVPGVGVPGVGVPGVGVPGVGVPGVGVPGVGVPGVGVPGVGVPGVGVPGVGVPGVGVPGVGVPGVGVPGVGVPGVGVPGVGVPGVGVPGVGVPGVGVPGVGVPGVGVPGVGVPGVGVPGVGVPGVGVPGVGVPGVGVPGVGVPGVGVPGVGVPGVGVPGVGVPGVGVPGVGVPGVGVPGVGVPGVGVPGVGVPGVGVPGVGVPGVGVPGVGVPGVGVPGVGVPGVGVPGVGVPGVGVPGVGVPGVGVPGVGVPGVGVPGVGVPGVGVPGVGVPGVGVPGVGVPGVGVPGVGVPGVGVPGVGVPGVGVPGVGVPGVGVPGVGVPGVGVPGVGVPGVGVPGVGVPGVGVPGVGVPGVGVPGVGVPGVGVPGVGVPGVGVPGVGVPGVGVPGVGVPGVGVPGVGVPGVGVPGVGVPGVGVPGVGVPGVGVPGAGAGSGAGAGSGAGAGSGAGAGSGAGAGSGAGAGSGAGAGSGAGAGSGAGAGSGAGAGSGAGAGSGAGAGSGAGAGSGAGAGSGAGAGSGAGAGSGAGAGSGAGAGSGAGAGSGAGAGSGAGAGSGAGAGSGAGAGSGAGAGSGAGAGSGAGAGSGAGAGSGAGAGSGAGAGSGAGAGSGAGAGSGAGAGSGAGAGSGAGAGSGAGAGSGAGAGSGAGAGSGAGAGSGAGAGSGAGAGSGAGAGSGAGAGSGAGAGSGAGAGSGAGAGSGAGAGSGAGAGSGAGAGSGAGAGSGAGAGSGAGAGSGAGAGSGAGAGSGAGAGSGAGAGSGAGAGSGAGAGSGAGAGSGAGAGSGAGAGSGAGAGSGAGAGSGAGAGSGAGAGSGAGAGSGAGAGSGAGAGSGAGAGSGAGAGSGAGAGSGAGAGSGAGAGSGAGAGSGAGAGSGAGAGSGAGAGSGAGAGSGAGAGSGAGAGSGAGAGSGAGAGSGAGAGSGAGAGSGAGAGSGAGAGSGAGAGSGAGAGSGAGAGSGAGAGSGAGAGSGAGAGSGAGAGSGAGAGSGAGAGSGAGAGSGAGAGSGAGAGSGAGAGSGAGAGSGAGAGSGAGAGSGAGAGSGAGAGSGAGAGSGAGAGSGAGAGSGAGAGSGAGAGSGAGAGSGAGAGSGAGAGSGAGAGSGAGAGSGAGAGSGAGAGSGAGAGSGAGAGSGAGAGSGAGAGSGAGAGSGAGAGSGAGAGSGAGAGSGAGAGSGAGAGSGAGAGSGAGAGSGAGAGSGAGAGSGAGAGSGAGAGSGAGAGSGAGAGSGAGAGSGAGAGSGAGAGSGAGAGSGAGAGSGAGAGSGAGAGSGAGAGSGAGAGSGAGAGSGAGAGSGAGAGSGAGAGSGAGAGSGAGAGSGAGAGSGAGAGSGAGAGSGAGAGSGAGAGSGAGAGSGAGAGSGAGAGSGAGAGSGAGAGSGAGAGSGAGAGSGAGAGSGAGAGSGAGAGSGAGAGSGAGAGSGAGAGSGAGAGSGAGAGSGAGAGSGAGAGSGAGAGSGAGAGSGAGAGSGAGAGSGAGAGSGAGAGSGAGAGSGAGAGSGAGAGSGAGAGSGAGAGSGAGAGSGAGAGSGAGAGSGAGAGSGAGAGSGAGAGSGAGAGSGAGAGSGAGAGSGAGAGSGAGAGSGAGAGSGAGAGSGAGAGSGAGAGSGAGAGSGAGAGSGAGAGSGAGAGSGAGAGSGVGVPGVGVPGVGVPGVGVPGVGVPGVGVPGVGVPGVGVPGVGVPGVGVPGVGVPGVGVPGVGVPGVGVPGVGVPGVGVPGVGVPGVGVPGVGVPGVGVPGVGVPGVGVPGVGVPGVGVPGVGVPGVGVPGVGVPGVGVPGVGVPGVGVPGVGVPGVGVPGVGVPGVGVPGVGVPGVGVPGVGVPGVGVPGVGVPGVGVPGVGVPGVGVPGVGVPGVGVPGVGVPGVGVPGVGVPGVGVPGVGVPGVGVPGVGVPGVGVPGVGVPGVGVPGVGVPGVGVPGVGVPGVGVPGVGVPGVGVPGVGVPGVGVPGVGVPGVGVPGVGVPGVGVPGVGVPGVGVPGVGVPGVGVPGVGVPGVGVPGVGVPGVGVPGVGVPGVGVPGVGVPGVGVPGVGVPGVGVPGVGVPGVGVPGVGVPGVGVPGVGVPGVGVPGVGVPGVGVPGVGVPGVGVPGVGVPGVGVPGVGVPGVGVPGVGVPGVGVPGVGVPGVGVPGVGVPGVGVPGXGVPGVGVPGVGVPGVGVPGVGVPGVGVPGVGVPGVGVPGVGVPGVGVPGVGVPGVGVPGVGVPGVGVPGVGVPGVGVPGVGVPGVGVPGVGVPGVGVPGVGVPGVGVPGVGVPGVGVPGVGVPGVGVPGVGVPGVGVPGVGVPGVGVPGVGVPGVGVPGVGVPGVGVPGVGVPGVGVPGVGVPGVGVPGVGVPGVGVPGVGVPGVGVPGVGVPGVGVPGVGVPGVGVPGVGVPGVGVPGVGVPGVGVPGVGVPGVGVPGVGVPGVGVPGVGVPGVGVPGVGVPGVGVPGVGVPGVGVPGVGVPGVGVPGVGVPGVGVPGVGVPGVGVPGVGVPGVGVPGVGVPGVGVPGVGVPGVGVPGVGVPGVGVPGVGVPGVGVPGVGVPGVGVPGVGVPGVGVPGVGVPGVGVPGVGVPGVGVPGVGVPGVGVPGVGVPGVGVPGVGVPGVGVPGVGVPGVGVPGVGVPGVGVPGVGVPGVGVPGVGVPGVGVPGVGVPGVGVPGVGVPGAGAGSGAGAGSGAGAGSGAGAGSGAGAGSGAGAGSGAGAGSGAGAGSGAGAGSGAGAGSGAGAGSGAGAGSGAGAGSGAGAGSGAGAGSGAGAGSGAGAGSGAGAGSGAGAGSGAGAGSGAGAGSGAGAGSGAGAGSGAGAGSGAGAGSGAGAGSGAGAGSGAGAGSGAGAGSGAGAGSGAGAGSGAGAGSGAGAGSGAGAGSGAGAGSGAGAGSGAGAGSGAGAGSGAGAGSGAGAGSGAGAGSGAGAGSGAGAGSGAGAGSGAGAGSGAGAGSGAGAGSGAGAGSGAGAGSGAGAGSGAGAGSGAGAGSGAGAGSGAGAGSGAGAGSGAGAGSGAGAGSGAGAGSGAGAGSGAGAGSGAGAGSGAGAGSGAGAGSGAGAGSGAGAGSGAGAGSGAGAGSGAGAGSGAGAGSGAGAGSGAGAGSGAGAGSGAGAGSGAGAGSGAGAGSGAGAGSGAGAGSGAGAGSGAGAGSGAGAGSGAGAGSGAGAGSGAGAGSGAGAGSGAGAGSGAGAGSGAGAGSGAGAGSGAGAGSGAGAGSGAGAGSGAGAGSGAGAGSGAGAGSGAGAGSGAGAGSGAGAGSGAGAGSGAGAGSGAGAGSGAGAGSGAGAGSGAGAGSGAGAGSGAGAGSGAGAGSGAGAGSGAGAGSGAGAGSGAGAGSGAGAGSGAGAGSGAGAGSGAGAGSGAGAGSGAGAGSGAGAGSGAGAGSGAGAGSGAGAGSGAGAGSGAGAGSGAGAGSGAGAGSGAGAGSGAGAGSGAGAGSGAGAGSGAGAGSGAGAGSGAGAGSGAGAGSGAGAGSGAGAGSGAGAGSGAGAGSGAGAGSGAGAGSGAGAGSGAGAGSGAGAGSGAGAGSGAGAGSGAGAGSGAGAGSGAGAGSGAGAGSGAGAGSGAGAGSGAGAGSGAGAGSGAGAGSGAGAGSGAGAGSGAGAGSGAGAGSGAGAGSGAGAGSGAGAGSGAGAGSGAGAGSGAGAGSGAGAGSGAGAGSGAGAGSGAGAGSGAGAGSGAGAGSGAGAGSGAGAGSGAGAGSGAGAGSGAGAGSGAGAGSGAGAGSGAGAGSGAGAGSGAGAGSGAGAGSGAGAGSGAGAGSGAGAGSGAGAGSGAGAGSGAGAGSGAGAGSGAGAGSGAGAGSGAGAGSGAGAGSGAGAGSGAGAGSGAGAGSGAGAGSGAGAGSGAGAGSGAGAGSGAGAGSGAGAGSGAGAGSGAGAGSGVGVPGVGVPGVGVPGVGVPGVGVPGVGVPGVGVPGVGVPGVGVPGVGVPGVGVPGVGVPGVGVPGVGVPGVGVPGVGVPGVGVPGVGVPGVGVPGVGVPGVGVPGVGVPGVGVPGVGVPGVGVPGVGVPGVGVPGVGVPGVGVPGVGVPGVGVPGVGVPGVGVPGVGVPGVGVPGVGVPGVGVPGVGVPGVGVPGVGVPGVGVPGVGVPGVGVPGVGVPGVGVPGVGVPGVGVPGVGVPGVGVPGVGVPGVGVPGVGVPGVGVPGVGVPGVGVPGVGVPGVGVPGVGVPGVGVPGVGVPGVGVPGVGVPGVGVPGVGVPGVGVPGVGVPGVGVPGVGVPGVGVPGVGVPGVGVPGVGVPGVGVPGVGVPGVGVPGVGVPGVGVPGVGVPGVGVPGVGVPGVGVPGVGVPGVGVPGVGVPGVGVPGVGVPGVGVPGVGVPGVGVPGVGVPGVGVPGVGVPGVGVPGVGVPGVGVPGVGVPGVGVPGVGVPGVGVPGVGVPGXGVPGVGVPGVGVPGVGVPGVGVPGVGVPGVGVPGVGVPGVGVPGVGVPGVGVPGVGVPGVGVPGVGVPGVGVPGVGVPGVGVPGVGVPGVGVPGVGVPGVGVPGVGVPGVGVPGVGVPGVGVPGVGVPGVGVPGVGVPGVGVPGVGVPGVGVPGVGVPGVGVPGVGVPGVGVPGVGVPGVGVPGVGVPGVGVPGVGVPGVGVPGVGVPGVGVPGVGVPGVGVPGVGVPGVGVPGVGVPGVGVPGVGVPGVGVPGVGVPGVGVPGVGVPGVGVPGVGVPGVGVPGVGVPGVGVPGVGVPGVGVPGVGVPGVGVPGVGVPGVGVPGVGVPGVGVPGVGVPGVGVPGVGVPGVGVPGVGVPGVGVPGVGVPGVGVPGVGVPGVGVPGVGVPGVGVPGVGVPGVGVPGVGVPGVGVPGVGVPGVGVPGVGVPGVGVPGVGVPGVGVPGVGVPGVGVPGVGVPGVGVPGVGVPGVGVPGVGVPGVGVPGVGVPGVGVPGVGVPGVGVPGAGAGSGAGAGSGAGAGSGAGAGSGAGAGSGAGAGSGAGAGSGAGAGSGAGAGSGAGAGSGAGAGSGAGAGSGAGAGSGAGAGSGAGAGSGAGAGSGAGAGSGAGAGSGAGAGSGAGAGSGAGAGSGAGAGSGAGAGSGAGAGSGAGAGSGAGAGSGAGAGSGAGAGSGAGAGSGAGAGSGAGAGSGAGAGSGAGAGSGAGAGSGAGAGSGAGAGSGAGAGSGAGAGSGAGAGSGAGAGSGAGAGSGAGAGSGAGAGSGAGAGSGAGAGSGAGAGSGAGAGSGAGAGSGAGAGSGAGAGSGAGAGSGAGAGSGAGAGSGAGAGSGAGAGSGAGAGSGAGAGSGAGAGSGAGAGSGAGAGSGAGAGSGAGAGSGAGAGSGAGAGSGAGAGSGAGAGSGAGAGSGAGAGSGAGAGSGAGAGSGAGAGSGAGAGSGAGAGSGAGAGSGAGAGSGAGAGSGAGAGSGAGAGSGAGAGSGAGAGSGAGAGSGAGAGSGAGAGSGAGAGSGAGAGSGAGAGSGAGAGSGAGAGSGAGAGSGAGAGSGAGAGSGAGAGSGAGAGSGAGAGSGAGAGSGAGAGSGAGAGSGAGAGSGAGAGSGAGAGSGAGAGSGAGAGSGAGAGSGAGAGSGAGAGSGAGAGSGAGAGSGAGAGSGAGAGSGAGAGSGAGAGSGAGAGSGAGAGSGAGAGSGAGAGSGAGAGSGAGAGSGAGAGSGAGAGSGAGAGSGAGAGSGAGAGSGAGAGSGAGAGSGAGAGSGAGAGSGAGAGSGAGAGSGAGAGSGAGAGSGAGAGSGAGAGSGAGAGSGAGAGSGAGAGSGAGAGSGAGAGSGAGAGSGAGAGSGAGAGSGAGAGSGAGAGSGAGAGSGAGAGSGAGAGSGAGAGSGAGAGSGAGAGSGAGAGSGAGAGSGAGAGSGAGAGSGAGAGSGAGAGSGAGAGSGAGAGSGAGAGSGAGAGSGAGAGSGAGAGSGAGAGSGAGAGSGAGAGSGAGAGSGAGAGSGAGAGSGAGAGSGAGAGSGAGAGSGAGAGSGAGAGSGAGAGSGAGAGSGAGAGSGAGAGSGAGAGSGAGAGSGAGAGSGAGAGSGAGAGSGAGAGSGAGAGSGAGAGSGAGAGSGAGAGSGAGAGSGAGAGSGAGAGSGAGAGSGAGAGSGAGAGSGAGAGSGAGAGSGAGAGSGAGAGSGAGAGSGAGAGSGAGAGSGAGAGSGAGAGSGAGAGSGVGVPGVGVPGVGVPGVGVPGVGVPGVGVPGVGVPGVGVPGVGVPGVGVPGVGVPGVGVPGVGVPGVGVPGVGVPGVGVPGVGVPGVGVPGVGVPGVGVPGVGVPGVGVPGVGVPGVGVPGVGVPGVGVPGVGVPGVGVPGVGVPGVGVPGVGVPGVGVPGVGVPGVGVPGVGVPGVGVPGVGVPGVGVPGVGVPGVGVPGVGVPGVGVPGVGVPGVGVPGVGVPGVGVPGVGVPGVGVPGVGVPGVGVPGVGVPGVGVPGVGVPGVGVPGVGVPGVGVPGVGVPGVGVPGVGVPGVGVPGVGVPGVGVPGVGVPGVGVPGVGVPGVGVPGVGVPGVGVPGVGVPGVGVPGVGVPGVGVPGVGVPGVGVPGVGVPGVGVPGVGVPGVGVPGVGVPGVGVPGVGVPGVGVPGVGVPGVGVPGVGVPGVGVPGVGVPGVGVPGVGVPGVGVPGVGVPGVGVPGVGVPGVGVPGVGVPGVGVPGVGVPGVGVPGVGVPGVGVPGXGVPGVGVPGVGVPGVGVPGVGVPGVGVPGVGVPGVGVPGVGVPGVGVPGVGVPGVGVPGVGVPGVGVPGVGVPGVGVPGVGVPGVGVPGVGVPGVGVPGVGVPGVGVPGVGVPGVGVPGVGVPGVGVPGVGVPGVGVPGVGVPGVGVPGVGVPGVGVPGVGVPGVGVPGVGVPGVGVPGVGVPGVGVPGVGVPGVGVPGVGVPGVGVPGVGVPGVGVPGVGVPGVGVPGVGVPGVGVPGVGVPGVGVPGVGVPGVGVPGVGVPGVGVPGVGVPGVGVPGVGVPGVGVPGVGVPGVGVPGVGVPGVGVPGVGVPGVGVPGVGVPGVGVPGVGVPGVGVPGVGVPGVGVPGVGVPGVGVPGVGVPGVGVPGVGVPGVGVPGVGVPGVGVPGVGVPGVGVPGVGVPGVGVPGVGVPGVGVPGVGVPGVGVPGVGVPGVGVPGVGVPGVGVPGVGVPGVGVPGVGVPGVGVPGVGVPGVGVPGVGVPGVGVPGVGVPGVGVPGVGVPGAGAGSGAGAGSGAGAGSGAGAGSGAGAGSGAGAGSGAGAGSGAGAGSGAGAGSGAGAGSGAGAGSGAGAGSGAGAGSGAGAGSGAGAGSGAGAGSGAGAGSGAGAGSGAGAGSGAGAGSGAGAGSGAGAGSGAGAGSGAGAGSGAGAGSGAGAGSGAGAGSGAGAGSGAGAGSGAGAGSGAGAGSGAGAGSGAGAGSGAGAGSGAGAGSGAGAGSGAGAGSGAGAGSGAGAGSGAGAGSGAGAGSGAGAGSGAGAGSGAGAGSGAGAGSGAGAGSGAGAGSGAGAGSGAGAGSGAGAGSGAGAGSGAGAGSGAGAGSGAGAGSGAGAGSGAGAGSGAGAGSGAGAGSGAGAGSGAGAGSGAGAGSGAGAGSGAGAGSGAGAGSGAGAGSGAGAGSGAGAGSGAGAGSGAGAGSGAGAGSGAGAGSGAGAGSGAGAGSGAGAGSGAGAGSGAGAGSGAGAGSGAGAGSGAGAGSGAGAGSGAGAGSGAGAGSGAGAGSGAGAGSGAGAGSGAGAGSGAGAGSGAGAGSGAGAGSGAGAGSGAGAGSGAGAGSGAGAGSGAGAGSGAGAGSGAGAGSGAGAGSGAGAGSGAGAGSGAGAGSGAGAGSGAGAGSGAGAGSGAGAGSGAGAGSGAGAGSGAGAGSGAGAGSGAGAGSGAGAGSGAGAGSGAGAGSGAGAGSGAGAGSGAGAGSGAGAGSGAGAGSGAGAGSGAGAGSGAGAGSGAGAGSGAGAGSGAGAGSGAGAGSGAGAGSGAGAGSGAGAGSGAGAGSGAGAGSGAGAGSGAGAGSGAGAGSGAGAGSGAGAGSGAGAGSGAGAGSGAGAGSGAGAGSGAGAGSGAGAGSGAGAGSGAGAGSGAGAGSGAGAGSGAGAGSGAGAGSGAGAGSGAGAGSGAGAGSGAGAGSGAGAGSGAGAGSGAGAGSGAGAGSGAGAGSGAGAGSGAGAGSGAGAGSGAGAGSGAGAGSGAGAGSGAGAGSGAGAGSGAGAGSGAGAGSGAGAGSGAGAGSGAGAGSGAGAGSGAGAGSGAGAGSGAGAGSGAGAGSGAGAGSGAGAGSGAGAGSGAGAGSGAGAGSGAGAGSGAGAGSGAGAGSGAGAGSGAGAGSGAGAGSGAGAGSGAGAGSGAGAGSGAGAGSGAGAGSGAGAGSGAGAGSGAGAGSGAGAGSGAGAGSGAGAGSGAGAGSGAGAGSGAGAGSGAGAGSGAGAGSGAGAGSGVGVPGVGVPGVGVPGVGVPGVGVPGVGVPGVGVPGVGVPGVGVPGVGVPGVGVPGVGVPGVGVPGVGVPGVGVPGVGVPGVGVPGVGVPGVGVPGVGVPGVGVPGVGVPGVGVPGVGVPGVGVPGVGVPGVGVPGVGVPGVGVPGVGVPGVGVPGVGVPGVGVPGVGVPGVGVPGVGVPGVGVPGVGVPGVGVPGVGVPGVGVPGVGVPGVGVPGVGVPGVGVPGVGVPGVGVPGVGVPGVGVPGVGVPGVGVPGVGVPGVGVPGVGVPGVGVPGVGVPGVGVPGVGVPGVGVPGVGVPGVGVPGVGVPGVGVPGVGVPGVGVPGVGVPGVGVPGVGVPGVGVPGVGVPGVGVPGVGVPGVGVPGVGVPGVGVPGVGVPGVGVPGVGVPGVGVPGVGVPGVGVPGVGVPGVGVPGVGVPGVGVPGVGVPGVGVPGVGVPGVGVPGVGVPGVGVPGVGVPGVGVPGVGVPGVGVPGVGVPGVGVPGVGVPGVGVPGVGVPGXGVPGVGVPGVGVPGVGVPGVGVPGVGVPGVGVPGVGVPGVGVPGVGVPGVGVPGVGVPGVGVPGVGVPGVGVPGVGVPGVGVPGVGVPGVGVPGVGVPGVGVPGVGVPGVGVPGVGVPGVGVPGVGVPGVGVPGVGVPGVGVPGVGVPGVGVPGVGVPGVGVPGVGVPGVGVPGVGVPGVGVPGVGVPGVGVPGVGVPGVGVPGVGVPGVGVPGVGVPGVGVPGVGVPGVGVPGVGVPGVGVPGVGVPGVGVPGVGVPGVGVPGVGVPGVGVPGVGVPGVGVPGVGVPGVGVPGVGVPGVGVPGVGVPGVGVPGVGVPGVGVPGVGVPGVGVPGVGVPGVGVPGVGVPGVGVPGVGVPGVGVPGVGVPGVGVPGVGVPGVGVPGVGVPGVGVPGVGVPGVGVPGVGVPGVGVPGVGVPGVGVPGVGVPGVGVPGVGVPGVGVPGVGVPGVGVPGVGVPGVGVPGVGVPGVGVPGVGVPGVGVPGVGVPGVGVPGVGVPGVGVPGAGAGSGAGAGSGAGAGSGAGAGSGAGAGSGAGAGSGAGAGSGAGAGSGAGAGSGAGAGSGAGAGSGAGAGSGAGAGSGAGAGSGAGAGSGAGAGSGAGAGSGAGAGSGAGAGSGAGAGSGAGAGSGAGAGSGAGAGSGAGAGSGAGAGSGAGAGSGAGAGSGAGAGSGAGAGSGAGAGSGAGAGSGAGAGSGAGAGSGAGAGSGAGAGSGAGAGSGAGAGSGAGAGSGAGAGSGAGAGSGAGAGSGAGAGSGAGAGSGAGAGSGAGAGSGAGAGSGAGAGSGAGAGSGAGAGSGAGAGSGAGAGSGAGAGSGAGAGSGAGAGSGAGAGSGAGAGSGAGAGSGAGAGSGAGAGSGAGAGSGAGAGSGAGAGSGAGAGSGAGAGSGAGAGSGAGAGSGAGAGSGAGAGSGAGAGSGAGAGSGAGAGSGAGAGSGAGAGSGAGAGSGAGAGSGAGAGSGAGAGSGAGAGSGAGAGSGAGAGSGAGAGSGAGAGSGAGAGSGAGAGSGAGAGSGAGAGSGAGAGSGAGAGSGAGAGSGAGAGSGAGAGSGAGAGSGAGAGSGAGAGSGAGAGSGAGAGSGAGAGSGAGAGSGAGAGSGAGAGSGAGAGSGAGAGSGAGAGSGAGAGSGAGAGSGAGAGSGAGAGSGAGAGSGAGAGSGAGAGSGAGAGSGAGAGSGAGAGSGAGAGSGAGAGSGAGAGSGAGAGSGAGAGSGAGAGSGAGAGSGAGAGSGAGAGSGAGAGSGAGAGSGAGAGSGAGAGSGAGAGSGAGAGSGAGAGSGAGAGSGAGAGSGAGAGSGAGAGSGAGAGSGAGAGSGAGAGSGAGAGSGAGAGSGAGAGSGAGAGSGAGAGSGAGAGSGAGAGSGAGAGSGAGAGSGAGAGSGAGAGSGAGAGSGAGAGSGAGAGSGAGAGSGAGAGSGAGAGSGAGAGSGAGAGSGAGAGSGAGAGSGAGAGSGAGAGSGAGAGSGAGAGSGAGAGSGAGAGSGAGAGSGAGAGSGAGAGSGAGAGSGAGAGSGAGAGSGAGAGSGAGAGSGAGAGSGAGAGSGAGAGSGAGAGSGAGAGSGAGAGSGAGAGSGAGAGSGAGAGSGAGAGSGAGAGSGAGAGSGAGAGSGAGAGSGAGAGSGAGAGSGAGAGSGAGAGSGAGAGSGAGAGSGAGAGSGAGAGSGAGAGSGAGAGSGAGAGSGAGAGSGAGAGSGAGAGSGAGAGSGAGAGSGVGVPGVGVPGVGVPGVGVPGVGVPGVGVPGVGVPGVGVPGVGVPGVGVPGVGVPGVGVPGVGVPGVGVPGVGVPGVGVPGVGVPGVGVPGVGVPGVGVPGVGVPGVGVPGVGVPGVGVPGVGVPGVGVPGVGVPGVGVPGVGVPGVGVPGVGVPGVGVPGVGVPGVGVPGVGVPGVGVPGVGVPGVGVPGVGVPGVGVPGVGVPGVGVPGVGVPGVGVPGVGVPGVGVPGVGVPGVGVPGVGVPGVGVPGVGVPGVGVPGVGVPGVGVPGVGVPGVGVPGVGVPGVGVPGVGVPGVGVPGVGVPGVGVPGVGVPGVGVPGVGVPGVGVPGVGVPGVGVPGVGVPGVGVPGVGVPGVGVPGVGVPGVGVPGVGVPGVGVPGVGVPGVGVPGVGVPGVGVPGVGVPGVGVPGVGVPGVGVPGVGVPGVGVPGVGVPGVGVPGVGVPGVGVPGVGVPGVGVPGVGVPGVGVPGVGVPGVGVPGVGVPGVGVPGVGVPGVGVPGXGVPGVGVPGVGVPGVGVPGVGVPGVGVPGVGVPGVGVPGVGVPGVGVPGVGVPGVGVPGVGVPGVGVPGVGVPGVGVPGVGVPGVGVPGVGVPGVGVPGVGVPGVGVPGVGVPGVGVPGVGVPGVGVPGVGVPGVGVPGVGVPGVGVPGVGVPGVGVPGVGVPGVGVPGVGVPGVGVPGVGVPGVGVPGVGVPGVGVPGVGVPGVGVPGVGVPGVGVPGVGVPGVGVPGVGVPGVGVPGVGVPGVGVPGVGVPGVGVPGVGVPGVGVPGVGVPGVGVPGVGVPGVGVPGVGVPGVGVPGVGVPGVGVPGVGVPGVGVPGVGVPGVGVPGVGVPGVGVPGVGVPGVGVPGVGVPGVGVPGVGVPGVGVPGVGVPGVGVPGVGVPGVGVPGVGVPGVGVPGVGVPGVGVPGVGVPGVGVPGVGVPGVGVPGVGVPGVGVPGVGVPGVGVPGVGVPGVGVPGVGVPGVGVPGVGVPGVGVPGVGVPGVGVPGVGVPGVGVPGVGVPGAGAGSGAGAGSGAGAGSGAGAGSGAGAGSGAGAGSGAGAGSGAGAGSGAGAGSGAGAGSGAGAGSGAGAGSGAGAGSGAGAGSGAGAGSGAGAGSGAGAGSGAGAGSGAGAGSGAGAGSGAGAGSGAGAGSGAGAGSGAGAGSGAGAGSGAGAGSGAGAGSGAGAGSGAGAGSGAGAGSGAGAGSGAGAGSGAGAGSGAGAGSGAGAGSGAGAGSGAGAGSGAGAGSGAGAGSGAGAGSGAGAGSGAGAGSGAGAGSGAGAGSGAGAGSGAGAGSGAGAGSGAGAGSGAGAGSGAGAGSGAGAGSGAGAGSGAGAGSGAGAGSGAGAGSGAGAGSGAGAGSGAGAGSGAGAGSGAGAGSGAGAGSGAGAGSGAGAGSGAGAGSGAGAGSGAGAGSGAGAGSGAGAGSGAGAGSGAGAGSGAGAGSGAGAGSGAGAGSGAGAGSGAGAGSGAGAGSGAGAGSGAGAGSGAGAGSGAGAGSGAGAGSGAGAGSGAGAGSGAGAGSGAGAGSGAGAGSGAGAGSGAGAGSGAGAGSGAGAGSGAGAGSGAGAGSGAGAGSGAGAGSGAGAGSGAGAGSGAGAGSGAGAGSGAGAGSGAGAGSGAGAGSGAGAGSGAGAGSGAGAGSGAGAGSGAGAGSGAGAGSGAGAGSGAGAGSGAGAGSGAGAGSGAGAGSGAGAGSGAGAGSGAGAGSGAGAGSGAGAGSGAGAGSGAGAGSGAGAGSGAGAGSGAGAGSGAGAGSGAGAGSGAGAGSGAGAGSGAGAGSGAGAGSGAGAGSGAGAGSGAGAGSGAGAGSGAGAGSGAGAGSGAGAGSGAGAGSGAGAGSGAGAGSGAGAGSGAGAGSGAGAGSGAGAGSGAGAGSGAGAGSGAGAGSGAGAGSGAGAGSGAGAGSGAGAGSGAGAGSGAGAGSGAGAGSGAGAGSGAGAGSGAGAGSGAGAGSGAGAGSGAGAGSGAGAGSGAGAGSGAGAGSGAGAGSGAGAGSGAGAGSGAGAGSGAGAGSGAGAGSGAGAGSGAGAGSGAGAGSGAGAGSGAGAGSGAGAGSGAGAGSGAGAGSGAGAGSGAGAGSGAGAGSGAGAGSGAGAGSGAGAGSGAGAGSGAGAGSGAGAGSGAGAGSGAGAGSGAGAGSGAGAGSGAGAGSGAGAGSGAGAGSGAGAGSGAGAGSGAGAGSGAGAGSGAGAGSGAGAGSGAGAGSGAGAGSGAGAGSGAGAGSGVGVPGVGVPGVGVPGVGVPGVGVPGVGVPGVGVPGVGVPGVGVPGVGVPGVGVPGVGVPGVGVPGVGVPGVGVPGVGVPGVGVPGVGVPGVGVPGVGVPGVGVPGVGVPGVGVPGVGVPGVGVPGVGVPGVGVPGVGVPGVGVPGVGVPGVGVPGVGVPGVGVPGVGVPGVGVPGVGVPGVGVPGVGVPGVGVPGVGVPGVGVPGVGVPGVGVPGVGVPGVGVPGVGVPGVGVPGVGVPGVGVPGVGVPGVGVPGVGVPGVGVPGVGVPGVGVPGVGVPGVGVPGVGVPGVGVPGVGVPGVGVPGVGVPGVGVPGVGVPGVGVPGVGVPGVGVPGVGVPGVGVPGVGVPGVGVPGVGVPGVGVPGVGVPGVGVPGVGVPGVGVPGVGVPGVGVPGVGVPGVGVPGVGVPGVGVPGVGVPGVGVPGVGVPGVGVPGVGVPGVGVPGVGVPGVGVPGVGVPGVGVPGVGVPGVGVPGVGVPGVGVPGVGVPGVGVPGVGVPGXGVPGVGVPGVGVPGVGVPGVGVPGVGVPGVGVPGVGVPGVGVPGVGVPGVGVPGVGVPGVGVPGVGVPGVGVPGVGVPGVGVPGVGVPGVGVPGVGVPGVGVPGVGVPGVGVPGVGVPGVGVPGVGVPGVGVPGVGVPGVGVPGVGVPGVGVPGVGVPGVGVPGVGVPGVGVPGVGVPGVGVPGVGVPGVGVPGVGVPGVGVPGVGVPGVGVPGVGVPGVGVPGVGVPGVGVPGVGVPGVGVPGVGVPGVGVPGVGVPGVGVPGVGVPGVGVPGVGVPGVGVPGVGVPGVGVPGVGVPGVGVPGVGVPGVGVPGVGVPGVGVPGVGVPGVGVPGVGVPGVGVPGVGVPGVGVPGVGVPGVGVPGVGVPGVGVPGVGVPGVGVPGVGVPGVGVPGVGVPGVGVPGVGVPGVGVPGVGVPGVGVPGVGVPGVGVPGVGVPGVGVPGVGVPGVGVPGVGVPGVGVPGVGVPGVGVPGVGVPGVGVPGVGVPGVGVPGVGVPGVGVPGAGAGSGAGAGSGAGAGSGAGAGSGAGAGSGAGAGSGAGAGSGAGAGSGAGAGSGAGAGSGAGAGSGAGAGSGAGAGSGAGAGSGAGAGSGAGAGSGAGAGSGAGAGSGAGAGSGAGAGSGAGAGSGAGAGSGAGAGSGAGAGSGAGAGSGAGAGSGAGAGSGAGAGSGAGAGSGAGAGSGAGAGSGAGAGSGAGAGSGAGAGSGAGAGSGAGAGSGAGAGSGAGAGSGAGAGSGAGAGSGAGAGSGAGAGSGAGAGSGAGAGSGAGAGSGAGAGSGAGAGSGAGAGSGAGAGSGAGAGSGAGAGSGAGAGSGAGAGSGAGAGSGAGAGSGAGAGSGAGAGSGAGAGSGAGAGSGAGAGSGAGAGSGAGAGSGAGAGSGAGAGSGAGAGSGAGAGSGAGAGSGAGAGSGAGAGSGAGAGSGAGAGSGAGAGSGAGAGSGAGAGSGAGAGSGAGAGSGAGAGSGAGAGSGAGAGSGAGAGSGAGAGSGAGAGSGAGAGSGAGAGSGAGAGSGAGAGSGAGAGSGAGAGSGAGAGSGAGAGSGAGAGSGAGAGSGAGAGSGAGAGSGAGAGSGAGAGSGAGAGSGAGAGSGAGAGSGAGAGSGAGAGSGAGAGSGAGAGSGAGAGSGAGAGSGAGAGSGAGAGSGAGAGSGAGAGSGAGAGSGAGAGSGAGAGSGAGAGSGAGAGSGAGAGSGAGAGSGAGAGSGAGAGSGAGAGSGAGAGSGAGAGSGAGAGSGAGAGSGAGAGSGAGAGSGAGAGSGAGAGSGAGAGSGAGAGSGAGAGSGAGAGSGAGAGSGAGAGSGAGAGSGAGAGSGAGAGSGAGAGSGAGAGSGAGAGSGAGAGSGAGAGSGAGAGSGAGAGSGAGAGSGAGAGSGAGAGSGAGAGSGAGAGSGAGAGSGAGAGSGAGAGSGAGAGSGAGAGSGAGAGSGAGAGSGAGAGSGAGAGSGAGAGSGAGAGSGAGAGSGAGAGSGAGAGSGAGAGSGAGAGSGAGAGSGAGAGSGAGAGSGAGAGSGAGAGSGAGAGSGAGAGSGAGAGSGAGAGSGAGAGSGAGAGSGAGAGSGAGAGSGAGAGSGAGAGSGAGAGSGAGAGSGAGAGSGAGAGSGAGAGSGAGAGSGAGAGSGAGAGSGAGAGSGAGAGSGAGAGSGAGAGSGAGAGSGAGAGSGAGAGSGAGAGSGAGAGSGAGAGSGAGAGSGAGAGSGAGAGSGAGAGSGVGVPGVGVPGVGVPGVGVPGVGVPGVGVPGVGVPGVGVPGVGVPGVGVPGVGVPGVGVPGVGVPGVGVPGVGVPGVGVPGVGVPGVGVPGVGVPGVGVPGVGVPGVGVPGVGVPGVGVPGVGVPGVGVPGVGVPGVGVPGVGVPGVGVPGVGVPGVGVPGVGVPGVGVPGVGVPGVGVPGVGVPGVGVPGVGVPGVGVPGVGVPGVGVPGVGVPGVGVPGVGVPGVGVPGVGVPGVGVPGVGVPGVGVPGVGVPGVGVPGVGVPGVGVPGVGVPGVGVPGVGVPGVGVPGVGVPGVGVPGVGVPGVGVPGVGVPGVGVPGVGVPGVGVPGVGVPGVGVPGVGVPGVGVPGVGVPGVGVPGVGVPGVGVPGVGVPGVGVPGVGVPGVGVPGVGVPGVGVPGVGVPGVGVPGVGVPGVGVPGVGVPGVGVPGVGVPGVGVPGVGVPGVGVPGVGVPGVGVPGVGVPGVGVPGVGVPGVGVPGVGVPGVGVPGVGVPGVGVPGXGVPGVGVPGVGVPGVGVPGVGVPGVGVPGVGVPGVGVPGVGVPGVGVPGVGVPGVGVPGVGVPGVGVPGVGVPGVGVPGVGVPGVGVPGVGVPGVGVPGVGVPGVGVPGVGVPGVGVPGVGVPGVGVPGVGVPGVGVPGVGVPGVGVPGVGVPGVGVPGVGVPGVGVPGVGVPGVGVPGVGVPGVGVPGVGVPGVGVPGVGVPGVGVPGVGVPGVGVPGVGVPGVGVPGVGVPGVGVPGVGVPGVGVPGVGVPGVGVPGVGVPGVGVPGVGVPGVGVPGVGVPGVGVPGVGVPGVGVPGVGVPGVGVPGVGVPGVGVPGVGVPGVGVPGVGVPGVGVPGVGVPGVGVPGVGVPGVGVPGVGVPGVGVPGVGVPGVGVPGVGVPGVGVPGVGVPGVGVPGVGVPGVGVPGVGVPGVGVPGVGVPGVGVPGVGVPGVGVPGVGVPGVGVPGVGVPGVGVPGVGVPGVGVPGVGVPGVGVPGVGVPGVGVPGVGVPGVGVPGVGVPGAGAGSGAGAGSGAGAGSGAGAGSGAGAGSGAGAGSGAGAGSGAGAGSGAGAGSGAGAGSGAGAGSGAGAGSGAGAGSGAGAGSGAGAGSGAGAGSGAGAGSGAGAGSGAGAGSGAGAGSGAGAGSGAGAGSGAGAGSGAGAGSGAGAGSGAGAGSGAGAGSGAGAGSGAGAGSGAGAGSGAGAGSGAGAGSGAGAGSGAGAGSGAGAGSGAGAGSGAGAGSGAGAGSGAGAGSGAGAGSGAGAGSGAGAGSGAGAGSGAGAGSGAGAGSGAGAGSGAGAGSGAGAGSGAGAGSGAGAGSGAGAGSGAGAGSGAGAGSGAGAGSGAGAGSGAGAGSGAGAGSGAGAGSGAGAGSGAGAGSGAGAGSGAGAGSGAGAGSGAGAGSGAGAGSGAGAGSGAGAGSGAGAGSGAGAGSGAGAGSGAGAGSGAGAGSGAGAGSGAGAGSGAGAGSGAGAGSGAGAGSGAGAGSGAGAGSGAGAGSGAGAGSGAGAGSGAGAGSGAGAGSGAGAGSGAGAGSGAGAGSGAGAGSGAGAGSGAGAGSGAGAGSGAGAGSGAGAGSGAGAGSGAGAGSGAGAGSGAGAGSGAGAGSGAGAGSGAGAGSGAGAGSGAGAGSGAGAGSGAGAGSGAGAGSGAGAGSGAGAGSGAGAGSGAGAGSGAGAGSGAGAGSGAGAGSGAGAGSGAGAGSGAGAGSGAGAGSGAGAGSGAGAGSGAGAGSGAGAGSGAGAGSGAGAGSGAGAGSGAGAGSGAGAGSGAGAGSGAGAGSGAGAGSGAGAGSGAGAGSGAGAGSGAGAGSGAGAGSGAGAGSGAGAGSGAGAGSGAGAGSGAGAGSGAGAGSGAGAGSGAGAGSGAGAGSGAGAGSGAGAGSGAGAGSGAGAGSGAGAGSGAGAGSGAGAGSGAGAGSGAGAGSGAGAGSGAGAGSGAGAGSGAGAGSGAGAGSGAGAGSGAGAGSGAGAGSGAGAGSGAGAGSGAGAGSGAGAGSGAGAGSGAGAGSGAGAGSGAGAGSGAGAGSGAGAGSGAGAGSGAGAGSGAGAGSGAGAGSGAGAGSGAGAGSGAGAGSGAGAGSGAGAGSGAGAGSGAGAGSGAGAGSGAGAGSGAGAGSGAGAGSGAGAGSGAGAGSGAGAGSGAGAGSGAGAGSGAGAGSGAGAGSGAGAGSGAGAGSGAGAGSGAGAGSGAGAGSGAGAGSGAGAGSGAGAGSGAGAGSGAGAGSGVGVPGVGVPGVGVPGVGVPGVGVPGVGVPGVGVPGVGVPGVGVPGVGVPGVGVPGVGVPGVGVPGVGVPGVGVPGVGVPGVGVPGVGVPGVGVPGVGVPGVGVPGVGVPGVGVPGVGVPGVGVPGVGVPGVGVPGVGVPGVGVPGVGVPGVGVPGVGVPGVGVPGVGVPGVGVPGVGVPGVGVPGVGVPGVGVPGVGVPGVGVPGVGVPGVGVPGVGVPGVGVPGVGVPGVGVPGVGVPGVGVPGVGVPGVGVPGVGVPGVGVPGVGVPGVGVPGVGVPGVGVPGVGVPGVGVPGVGVPGVGVPGVGVPGVGVPGVGVPGVGVPGVGVPGVGVPGVGVPGVGVPGVGVPGVGVPGVGVPGVGVPGVGVPGVGVPGVGVPGVGVPGVGVPGVGVPGVGVPGVGVPGVGVPGVGVPGVGVPGVGVPGVGVPGVGVPGVGVPGVGVPGVGVPGVGVPGVGVPGVGVPGVGVPGVGVPGVGVPGVGVPGVGVPGVGVPGVGVPGXGVPGVGVPGVGVPGVGVPGVGVPGVGVPGVGVPGVGVPGVGVPGVGVPGVGVPGVGVPGVGVPGVGVPGVGVPGVGVPGVGVPGVGVPGVGVPGVGVPGVGVPGVGVPGVGVPGVGVPGVGVPGVGVPGVGVPGVGVPGVGVPGVGVPGVGVPGVGVPGVGVPGVGVPGVGVPGVGVPGVGVPGVGVPGVGVPGVGVPGVGVPGVGVPGVGVPGVGVPGVGVPGVGVPGVGVPGVGVPGVGVPGVGVPGVGVPGVGVPGVGVPGVGVPGVGVPGVGVPGVGVPGVGVPGVGVPGVGVPGVGVPGVGVPGVGVPGVGVPGVGVPGVGVPGVGVPGVGVPGVGVPGVGVPGVGVPGVGVPGVGVPGVGVPGVGVPGVGVPGVGVPGVGVPGVGVPGVGVPGVGVPGVGVPGVGVPGVGVPGVGVPGVGVPGVGVPGVGVPGVGVPGVGVPGVGVPGVGVPGVGVPGVGVPGVGVPGVGVPGVGVPGVGVPGVGVPGVGVPGVGVPGAGAGSGAGAGSGAGAGSGAGAGSGAGAGSGAGAGSGAGAGSGAGAGSGAGAGSGAGAGSGAGAGSGAGAGSGAGAGSGAGAGSGAGAGSGAGAGSGAGAGSGAGAGSGAGAGSGAGAGSGAGAGSGAGAGSGAGAGSGAGAGSGAGAGSGAGAGSGAGAGSGAGAGSGAGAGSGAGAGSGAGAGSGAGAGSGAGAGSGAGAGSGAGAGSGAGAGSGAGAGSGAGAGSGAGAGSGAGAGSGAGAGSGAGAGSGAGAGSGAGAGSGAGAGSGAGAGSGAGAGSGAGAGSGAGAGSGAGAGSGAGAGSGAGAGSGAGAGSGAGAGSGAGAGSGAGAGSGAGAGSGAGAGSGAGAGSGAGAGSGAGAGSGAGAGSGAGAGSGAGAGSGAGAGSGAGAGSGAGAGSGAGAGSGAGAGSGAGAGSGAGAGSGAGAGSGAGAGSGAGAGSGAGAGSGAGAGSGAGAGSGAGAGSGAGAGSGAGAGSGAGAGSGAGAGSGAGAGSGAGAGSGAGAGSGAGAGSGAGAGSGAGAGSGAGAGSGAGAGSGAGAGSGAGAGSGAGAGSGAGAGSGAGAGSGAGAGSGAGAGSGAGAGSGAGAGSGAGAGSGAGAGSGAGAGSGAGAGSGAGAGSGAGAGSGAGAGSGAGAGSGAGAGSGAGAGSGAGAGSGAGAGSGAGAGSGAGAGSGAGAGSGAGAGSGAGAGSGAGAGSGAGAGSGAGAGSGAGAGSGAGAGSGAGAGSGAGAGSGAGAGSGAGAGSGAGAGSGAGAGSGAGAGSGAGAGSGAGAGSGAGAGSGAGAGSGAGAGSGAGAGSGAGAGSGAGAGSGAGAGSGAGAGSGAGAGSGAGAGSGAGAGSGAGAGSGAGAGSGAGAGSGAGAGSGAGAGSGAGAGSGAGAGSGAGAGSGAGAGSGAGAGSGAGAGSGAGAGSGAGAGSGAGAGSGAGAGSGAGAGSGAGAGSGAGAGSGAGAGSGAGAGSGAGAGSGAGAGSGAGAGSGAGAGSGAGAGSGAGAGSGAGAGSGAGAGSGAGAGSGAGAGSGAGAGSGAGAGSGAGAGSGAGAGSGAGAGSGAGAGSGAGAGSGAGAGSGAGAGSGAGAGSGAGAGSGAGAGSGAGAGSGAGAGSGAGAGSGAGAGSGAGAGSGAGAGSGAGAGSGAGAGSGAGAGSGAGAGSGAGAGSGAGAGSGAGAGSGAGAGSGAGAGSGAGAGSGAGAGSGAGAGSGVGVPGVGVPGVGVPGVGVPGVGVPGVGVPGVGVPGVGVPGVGVPGVGVPGVGVPGVGVPGVGVPGVGVPGVGVPGVGVPGVGVPGVGVPGVGVPGVGVPGVGVPGVGVPGVGVPGVGVPGVGVPGVGVPGVGVPGVGVPGVGVPGVGVPGVGVPGVGVPGVGVPGVGVPGVGVPGVGVPGVGVPGVGVPGVGVPGVGVPGVGVPGVGVPGVGVPGVGVPGVGVPGVGVPGVGVPGVGVPGVGVPGVGVPGVGVPGVGVPGVGVPGVGVPGVGVPGVGVPGVGVPGVGVPGVGVPGVGVPGVGVPGVGVPGVGVPGVGVPGVGVPGVGVPGVGVPGVGVPGVGVPGVGVPGVGVPGVGVPGVGVPGVGVPGVGVPGVGVPGVGVPGVGVPGVGVPGVGVPGVGVPGVGVPGVGVPGVGVPGVGVPGVGVPGVGVPGVGVPGVGVPGVGVPGVGVPGVGVPGVGVPGVGVPGVGVPGVGVPGVGVPGVGVPGVGVPGVGVPGXGVPGVGVPGVGVPGVGVPGVGVPGVGVPGVGVPGVGVPGVGVPGVGVPGVGVPGVGVPGVGVPGVGVPGVGVPGVGVPGVGVPGVGVPGVGVPGVGVPGVGVPGVGVPGVGVPGVGVPGVGVPGVGVPGVGVPGVGVPGVGVPGVGVPGVGVPGVGVPGVGVPGVGVPGVGVPGVGVPGVGVPGVGVPGVGVPGVGVPGVGVPGVGVPGVGVPGVGVPGVGVPGVGVPGVGVPGVGVPGVGVPGVGVPGVGVPGVGVPGVGVPGVGVPGVGVPGVGVPGVGVPGVGVPGVGVPGVGVPGVGVPGVGVPGVGVPGVGVPGVGVPGVGVPGVGVPGVGVPGVGVPGVGVPGVGVPGVGVPGVGVPGVGVPGVGVPGVGVPGVGVPGVGVPGVGVPGVGVPGVGVPGVGVPGVGVPGVGVPGVGVPGVGVPGVGVPGVGVPGVGVPGVGVPGVGVPGVGVPGVGVPGVGVPGVGVPGVGVPGVGVPGVGVPGVGVPGVGVPGVGVPGAGAGSGAGAGSGAGAGSGAGAGSGAGAGSGAGAGSGAGAGSGAGAGSGAGAGSGAGAGSGAGAGSGAGAGSGAGAGSGAGAGSGAGAGSGAGAGSGAGAGSGAGAGSGAGAGSGAGAGSGAGAGSGAGAGSGAGAGSGAGAGSGAGAGSGAGAGSGAGAGSGAGAGSGAGAGSGAGAGSGAGAGSGAGAGSGAGAGSGAGAGSGAGAGSGAGAGSGAGAGSGAGAGSGAGAGSGAGAGSGAGAGSGAGAGSGAGAGSGAGAGSGAGAGSGAGAGSGAGAGSGAGAGSGAGAGSGAGAGSGAGAGSGAGAGSGAGAGSGAGAGSGAGAGSGAGAGSGAGAGSGAGAGSGAGAGSGAGAGSGAGAGSGAGAGSGAGAGSGAGAGSGAGAGSGAGAGSGAGAGSGAGAGSGAGAGSGAGAGSGAGAGSGAGAGSGAGAGSGAGAGSGAGAGSGAGAGSGAGAGSGAGAGSGAGAGSGAGAGSGAGAGSGAGAGSGAGAGSGAGAGSGAGAGSGAGAGSGAGAGSGAGAGSGAGAGSGAGAGSGAGAGSGAGAGSGAGAGSGAGAGSGAGAGSGAGAGSGAGAGSGAGAGSGAGAGSGAGAGSGAGAGSGAGAGSGAGAGSGAGAGSGAGAGSGAGAGSGAGAGSGAGAGSGAGAGSGAGAGSGAGAGSGAGAGSGAGAGSGAGAGSGAGAGSGAGAGSGAGAGSGAGAGSGAGAGSGAGAGSGAGAGSGAGAGSGAGAGSGAGAGSGAGAGSGAGAGSGAGAGSGAGAGSGAGAGSGAGAGSGAGAGSGAGAGSGAGAGSGAGAGSGAGAGSGAGAGSGAGAGSGAGAGSGAGAGSGAGAGSGAGAGSGAGAGSGAGAGSGAGAGSGAGAGSGAGAGSGAGAGSGAGAGSGAGAGSGAGAGSGAGAGSGAGAGSGAGAGSGAGAGSGAGAGSGAGAGSGAGAGSGAGAGSGAGAGSGAGAGSGAGAGSGAGAGSGAGAGSGAGAGSGAGAGSGAGAGSGAGAGSGAGAGSGAGAGSGAGAGSGAGAGSGAGAGSGAGAGSGAGAGSGAGAGSGAGAGSGAGAGSGAGAGSGAGAGSGAGAGSGAGAGSGAGAGSGAGAGSGAGAGSGAGAGSGAGAGSGAGAGSGAGAGSGAGAGSGAGAGSGAGAGSGAGAGSGAGAGSGAGAGSGAGAGSGAGAGSGAGAGSGAGAGSGAGAGSGAGAGSGAGAGSGVGVPGVGVPGVGVPGVGVPGVGVPGVGVPGVGVPGVGVPGVGVPGVGVPGVGVPGVGVPGVGVPGVGVPGVGVPGVGVPGVGVPGVGVPGVGVPGVGVPGVGVPGVGVPGVGVPGVGVPGVGVPGVGVPGVGVPGVGVPGVGVPGVGVPGVGVPGVGVPGVGVPGVGVPGVGVPGVGVPGVGVPGVGVPGVGVPGVGVPGVGVPGVGVPGVGVPGVGVPGVGVPGVGVPGVGVPGVGVPGVGVPGVGVPGVGVPGVGVPGVGVPGVGVPGVGVPGVGVPGVGVPGVGVPGVGVPGVGVPGVGVPGVGVPGVGVPGVGVPGVGVPGVGVPGVGVPGVGVPGVGVPGVGVPGVGVPGVGVPGVGVPGVGVPGVGVPGVGVPGVGVPGVGVPGVGVPGVGVPGVGVPGVGVPGVGVPGVGVPGVGVPGVGVPGVGVPGVGVPGVGVPGVGVPGVGVPGVGVPGVGVPGVGVPGVGVPGVGVPGVGVPGVGVPGVGVPGVGVPGXGVPGVGVPGVGVPGVGVPGVGVPGVGVPGVGVPGVGVPGVGVPGVGVPGVGVPGVGVPGVGVPGVGVPGVGVPGVGVPGVGVPGVGVPGVGVPGVGVPGVGVPGVGVPGVGVPGVGVPGVGVPGVGVPGVGVPGVGVPGVGVPGVGVPGVGVPGVGVPGVGVPGVGVPGVGVPGVGVPGVGVPGVGVPGVGVPGVGVPGVGVPGVGVPGVGVPGVGVPGVGVPGVGVPGVGVPGVGVPGVGVPGVGVPGVGVPGVGVPGVGVPGVGVPGVGVPGVGVPGVGVPGVGVPGVGVPGVGVPGVGVPGVGVPGVGVPGVGVPGVGVPGVGVPGVGVPGVGVPGVGVPGVGVPGVGVPGVGVPGVGVPGVGVPGVGVPGVGVPGVGVPGVGVPGVGVPGVGVPGVGVPGVGVPGVGVPGVGVPGVGVPGVGVPGVGVPGVGVPGVGVPGVGVPGVGVPGVGVPGVGVPGVGVPGVGVPGVGVPGVGVPGVGVPGVGVPGVGVPGVGVPGAGAGSGAGAGSGAGAGSGAGAGSGAGAGSGAGAGSGAGAGSGAGAGSGAGAGSGAGAGSGAGAGSGAGAGSGAGAGSGAGAGSGAGAGSGAGAGSGAGAGSGAGAGSGAGAGSGAGAGSGAGAGSGAGAGSGAGAGSGAGAGSGAGAGSGAGAGSGAGAGSGAGAGSGAGAGSGAGAGSGAGAGSGAGAGSGAGAGSGAGAGSGAGAGSGAGAGSGAGAGSGAGAGSGAGAGSGAGAGSGAGAGSGAGAGSGAGAGSGAGAGSGAGAGSGAGAGSGAGAGSGAGAGSGAGAGSGAGAGSGAGAGSGAGAGSGAGAGSGAGAGSGAGAGSGAGAGSGAGAGSGAGAGSGAGAGSGAGAGSGAGAGSGAGAGSGAGAGSGAGAGSGAGAGSGAGAGSGAGAGSGAGAGSGAGAGSGAGAGSGAGAGSGAGAGSGAGAGSGAGAGSGAGAGSGAGAGSGAGAGSGAGAGSGAGAGSGAGAGSGAGAGSGAGAGSGAGAGSGAGAGSGAGAGSGAGAGSGAGAGSGAGAGSGAGAGSGAGAGSGAGAGSGAGAGSGAGAGSGAGAGSGAGAGSGAGAGSGAGAGSGAGAGSGAGAGSGAGAGSGAGAGSGAGAGSGAGAGSGAGAGSGAGAGSGAGAGSGAGAGSGAGAGSGAGAGSGAGAGSGAGAGSGAGAGSGAGAGSGAGAGSGAGAGSGAGAGSGAGAGSGAGAGSGAGAGSGAGAGSGAGAGSGAGAGSGAGAGSGAGAGSGAGAGSGAGAGSGAGAGSGAGAGSGAGAGSGAGAGSGAGAGSGAGAGSGAGAGSGAGAGSGAGAGSGAGAGSGAGAGSGAGAGSGAGAGSGAGAGSGAGAGSGAGAGSGAGAGSGAGAGSGAGAGSGAGAGSGAGAGSGAGAGSGAGAGSGAGAGSGAGAGSGAGAGSGAGAGSGAGAGSGAGAGSGAGAGSGAGAGSGAGAGSGAGAGSGAGAGSGAGAGSGAGAGSGAGAGSGAGAGSGAGAGSGAGAGSGAGAGSGAGAGSGAGAGSGAGAGSGAGAGSGAGAGSGAGAGSGAGAGSGAGAGSGAGAGSGAGAGSGAGAGSGAGAGSGAGAGSGAGAGSGAGAGSGAGAGSGAGAGSGAGAGSGAGAGSGAGAGSGAGAGSGAGAGSGAGAGSGAGAGSGAGAGSGAGAGSGAGAGSGAGAGSGAGAGSGAGAGSGAGAGSGAGAGSGAGAGSGAGAGSGVGVPGVGVPGVGVPGVGVPGVGVPGVGVPGVGVPGVGVPGVGVPGVGVPGVGVPGVGVPGVGVPGVGVPGVGVPGVGVPGVGVPGVGVPGVGVPGVGVPGVGVPGVGVPGVGVPGVGVPGVGVPGVGVPGVGVPGVGVPGVGVPGVGVPGVGVPGVGVPGVGVPGVGVPGVGVPGVGVPGVGVPGVGVPGVGVPGVGVPGVGVPGVGVPGVGVPGVGVPGVGVPGVGVPGVGVPGVGVPGVGVPGVGVPGVGVPGVGVPGVGVPGVGVPGVGVPGVGVPGVGVPGVGVPGVGVPGVGVPGVGVPGVGVPGVGVPGVGVPGVGVPGVGVPGVGVPGVGVPGVGVPGVGVPGVGVPGVGVPGVGVPGVGVPGVGVPGVGVPGVGVPGVGVPGVGVPGVGVPGVGVPGVGVPGVGVPGVGVPGVGVPGVGVPGVGVPGVGVPGVGVPGVGVPGVGVPGVGVPGVGVPGVGVPGVGVPGVGVPGVGVPGVGVPGVGVPGVGVPGXGVPGVGVPGVGVPGVGVPGVGVPGVGVPGVGVPGVGVPGVGVPGVGVPGVGVPGVGVPGVGVPGVGVPGVGVPGVGVPGVGVPGVGVPGVGVPGVGVPGVGVPGVGVPGVGVPGVGVPGVGVPGVGVPGVGVPGVGVPGVGVPGVGVPGVGVPGVGVPGVGVPGVGVPGVGVPGVGVPGVGVPGVGVPGVGVPGVGVPGVGVPGVGVPGVGVPGVGVPGVGVPGVGVPGVGVPGVGVPGVGVPGVGVPGVGVPGVGVPGVGVPGVGVPGVGVPGVGVPGVGVPGVGVPGVGVPGVGVPGVGVPGVGVPGVGVPGVGVPGVGVPGVGVPGVGVPGVGVPGVGVPGVGVPGVGVPGVGVPGVGVPGVGVPGVGVPGVGVPGVGVPGVGVPGVGVPGVGVPGVGVPGVGVPGVGVPGVGVPGVGVPGVGVPGVGVPGVGVPGVGVPGVGVPGVGVPGVGVPGVGVPGVGVPGVGVPGVGVPGVGVPGVGVPGVGVPGVGVPGVGVPGAGAGSGAGAGSGAGAGSGAGAGSGAGAGSGAGAGSGAGAGSGAGAGSGAGAGSGAGAGSGAGAGSGAGAGSGAGAGSGAGAGSGAGAGSGAGAGSGAGAGSGAGAGSGAGAGSGAGAGSGAGAGSGAGAGSGAGAGSGAGAGSGAGAGSGAGAGSGAGAGSGAGAGSGAGAGSGAGAGSGAGAGSGAGAGSGAGAGSGAGAGSGAGAGSGAGAGSGAGAGSGAGAGSGAGAGSGAGAGSGAGAGSGAGAGSGAGAGSGAGAGSGAGAGSGAGAGSGAGAGSGAGAGSGAGAGSGAGAGSGAGAGSGAGAGSGAGAGSGAGAGSGAGAGSGAGAGSGAGAGSGAGAGSGAGAGSGAGAGSGAGAGSGAGAGSGAGAGSGAGAGSGAGAGSGAGAGSGAGAGSGAGAGSGAGAGSGAGAGSGAGAGSGAGAGSGAGAGSGAGAGSGAGAGSGAGAGSGAGAGSGAGAGSGAGAGSGAGAGSGAGAGSGAGAGSGAGAGSGAGAGSGAGAGSGAGAGSGAGAGSGAGAGSGAGAGSGAGAGSGAGAGSGAGAGSGAGAGSGAGAGSGAGAGSGAGAGSGAGAGSGAGAGSGAGAGSGAGAGSGAGAGSGAGAGSGAGAGSGAGAGSGAGAGSGAGAGSGAGAGSGAGAGSGAGAGSGAGAGSGAGAGSGAGAGSGAGAGSGAGAGSGAGAGSGAGAGSGAGAGSGAGAGSGAGAGSGAGAGSGAGAGSGAGAGSGAGAGSGAGAGSGAGAGSGAGAGSGAGAGSGAGAGSGAGAGSGAGAGSGAGAGSGAGAGSGAGAGSGAGAGSGAGAGSGAGAGSGAGAGSGAGAGSGAGAGSGAGAGSGAGAGSGAGAGSGAGAGSGAGAGSGAGAGSGAGAGSGAGAGSGAGAGSGAGAGSGAGAGSGAGAGSGAGAGSGAGAGSGAGAGSGAGAGSGAGAGSGAGAGSGAGAGSGAGAGSGAGAGSGAGAGSGAGAGSGAGAGSGAGAGSGAGAGSGAGAGSGAGAGSGAGAGSGAGAGSGAGAGSGAGAGSGAGAGSGAGAGSGAGAGSGAGAGSGAGAGSGAGAGSGAGAGSGAGAGSGAGAGSGAGAGSGAGAGSGAGAGSGAGAGSGAGAGSGAGAGSGAGAGSGAGAGSGAGAGSGAGAGSGAGAGSGAGAGSGAGAGSGAGAGSGAGAGSGAGAGSGAGAGSGAGAGSGAGAGSGAGAGSGAGAGSGVGVPGVGVPGVGVPGVGVPGVGVPGVGVPGVGVPGVGVPGVGVPGVGVPGVGVPGVGVPGVGVPGVGVPGVGVPGVGVPGVGVPGVGVPGVGVPGVGVPGVGVPGVGVPGVGVPGVGVPGVGVPGVGVPGVGVPGVGVPGVGVPGVGVPGVGVPGVGVPGVGVPGVGVPGVGVPGVGVPGVGVPGVGVPGVGVPGVGVPGVGVPGVGVPGVGVPGVGVPGVGVPGVGVPGVGVPGVGVPGVGVPGVGVPGVGVPGVGVPGVGVPGVGVPGVGVPGVGVPGVGVPGVGVPGVGVPGVGVPGVGVPGVGVPGVGVPGVGVPGVGVPGVGVPGVGVPGVGVPGVGVPGVGVPGVGVPGVGVPGVGVPGVGVPGVGVPGVGVPGVGVPGVGVPGVGVPGVGVPGVGVPGVGVPGVGVPGVGVPGVGVPGVGVPGVGVPGVGVPGVGVPGVGVPGVGVPGVGVPGVGVPGVGVPGVGVPGVGVPGVGVPGVGVPGVGVPGVGVPGXGVPGVGVPGVGVPGVGVPGVGVPGVGVPGVGVPGVGVPGVGVPGVGVPGVGVPGVGVPGVGVPGVGVPGVGVPGVGVPGVGVPGVGVPGVGVPGVGVPGVGVPGVGVPGVGVPGVGVPGVGVPGVGVPGVGVPGVGVPGVGVPGVGVPGVGVPGVGVPGVGVPGVGVPGVGVPGVGVPGVGVPGVGVPGVGVPGVGVPGVGVPGVGVPGVGVPGVGVPGVGVPGVGVPGVGVPGVGVPGVGVPGVGVPGVGVPGVGVPGVGVPGVGVPGVGVPGVGVPGVGVPGVGVPGVGVPGVGVPGVGVPGVGVPGVGVPGVGVPGVGVPGVGVPGVGVPGVGVPGVGVPGVGVPGVGVPGVGVPGVGVPGVGVPGVGVPGVGVPGVGVPGVGVPGVGVPGVGVPGVGVPGVGVPGVGVPGVGVPGVGVPGVGVPGVGVPGVGVPGVGVPGVGVPGVGVPGVGVPGVGVPGVGVPGVGVPGVGVPGVGVPGVGVPGVGVPGVGVPGVGVPGAGAGSGAGAGSGAGAGSGAGAGSGAGAGSGAGAGSGAGAGSGAGAGSGAGAGSGAGAGSGAGAGSGAGAGSGAGAGSGAGAGSGAGAGSGAGAGSGAGAGSGAGAGSGAGAGSGAGAGSGAGAGSGAGAGSGAGAGSGAGAGSGAGAGSGAGAGSGAGAGSGAGAGSGAGAGSGAGAGSGAGAGSGAGAGSGAGAGSGAGAGSGAGAGSGAGAGSGAGAGSGAGAGSGAGAGSGAGAGSGAGAGSGAGAGSGAGAGSGAGAGSGAGAGSGAGAGSGAGAGSGAGAGSGAGAGSGAGAGSGAGAGSGAGAGSGAGAGSGAGAGSGAGAGSGAGAGSGAGAGSGAGAGSGAGAGSGAGAGSGAGAGSGAGAGSGAGAGSGAGAGSGAGAGSGAGAGSGAGAGSGAGAGSGAGAGSGAGAGSGAGAGSGAGAGSGAGAGSGAGAGSGAGAGSGAGAGSGAGAGSGAGAGSGAGAGSGAGAGSGAGAGSGAGAGSGAGAGSGAGAGSGAGAGSGAGAGSGAGAGSGAGAGSGAGAGSGAGAGSGAGAGSGAGAGSGAGAGSGAGAGSGAGAGSGAGAGSGAGAGSGAGAGSGAGAGSGAGAGSGAGAGSGAGAGSGAGAGSGAGAGSGAGAGSGAGAGSGAGAGSGAGAGSGAGAGSGAGAGSGAGAGSGAGAGSGAGAGSGAGAGSGAGAGSGAGAGSGAGAGSGAGAGSGAGAGSGAGAGSGAGAGSGAGAGSGAGAGSGAGAGSGAGAGSGAGAGSGAGAGSGAGAGSGAGAGSGAGAGSGAGAGSGAGAGSGAGAGSGAGAGSGAGAGSGAGAGSGAGAGSGAGAGSGAGAGSGAGAGSGAGAGSGAGAGSGAGAGSGAGAGSGAGAGSGAGAGSGAGAGSGAGAGSGAGAGSGAGAGSGAGAGSGAGAGSGAGAGSGAGAGSGAGAGSGAGAGSGAGAGSGAGAGSGAGAGSGAGAGSGAGAGSGAGAGSGAGAGSGAGAGSGAGAGSGAGAGSGAGAGSGAGAGSGAGAGSGAGAGSGAGAGSGAGAGSGAGAGSGAGAGSGAGAGSGAGAGSGAGAGSGAGAGSGAGAGSGAGAGSGAGAGSGAGAGSGAGAGSGAGAGSGAGAGSGAGAGSGAGAGSGAGAGSGAGAGSGAGAGSGAGAGSGAGAGSGAGAGSGAGAGSGAGAGSGAGAGSGAGAGSGAGAGSGAGAGSGAGAGSGAGAGSGVGVPGVGVPGVGVPGVGVPGVGVPGVGVPGVGVPGVGVPGVGVPGVGVPGVGVPGVGVPGVGVPGVGVPGVGVPGVGVPGVGVPGVGVPGVGVPGVGVPGVGVPGVGVPGVGVPGVGVPGVGVPGVGVPGVGVPGVGVPGVGVPGVGVPGVGVPGVGVPGVGVPGVGVPGVGVPGVGVPGVGVPGVGVPGVGVPGVGVPGVGVPGVGVPGVGVPGVGVPGVGVPGVGVPGVGVPGVGVPGVGVPGVGVPGVGVPGVGVPGVGVPGVGVPGVGVPGVGVPGVGVPGVGVPGVGVPGVGVPGVGVPGVGVPGVGVPGVGVPGVGVPGVGVPGVGVPGVGVPGVGVPGVGVPGVGVPGVGVPGVGVPGVGVPGVGVPGVGVPGVGVPGVGVPGVGVPGVGVPGVGVPGVGVPGVGVPGVGVPGVGVPGVGVPGVGVPGVGVPGVGVPGVGVPGVGVPGVGVPGVGVPGVGVPGVGVPGVGVPGVGVPGVGVPGVGVPGVGVPGXGVPGVGVPGVGVPGVGVPGVGVPGVGVPGVGVPGVGVPGVGVPGVGVPGVGVPGVGVPGVGVPGVGVPGVGVPGVGVPGVGVPGVGVPGVGVPGVGVPGVGVPGVGVPGVGVPGVGVPGVGVPGVGVPGVGVPGVGVPGVGVPGVGVPGVGVPGVGVPGVGVPGVGVPGVGVPGVGVPGVGVPGVGVPGVGVPGVGVPGVGVPGVGVPGVGVPGVGVPGVGVPGVGVPGVGVPGVGVPGVGVPGVGVPGVGVPGVGVPGVGVPGVGVPGVGVPGVGVPGVGVPGVGVPGVGVPGVGVPGVGVPGVGVPGVGVPGVGVPGVGVPGVGVPGVGVPGVGVPGVGVPGVGVPGVGVPGVGVPGVGVPGVGVPGVGVPGVGVPGVGVPGVGVPGVGVPGVGVPGVGVPGVGVPGVGVPGVGVPGVGVPGVGVPGVGVPGVGVPGVGVPGVGVPGVGVPGVGVPGVGVPGVGVPGVGVPGVGVPGVGVPGVGVPGVGVPGVGVPGVGVPGAGAGSGAGAGSGAGAGSGAGAGSGAGAGSGAGAGSGAGAGSGAGAGSGAGAGSGAGAGSGAGAGSGAGAGSGAGAGSGAGAGSGAGAGSGAGAGSGAGAGSGAGAGSGAGAGSGAGAGSGAGAGSGAGAGSGAGAGSGAGAGSGAGAGSGAGAGSGAGAGSGAGAGSGAGAGSGAGAGSGAGAGSGAGAGSGAGAGSGAGAGSGAGAGSGAGAGSGAGAGSGAGAGSGAGAGSGAGAGSGAGAGSGAGAGSGAGAGSGAGAGSGAGAGSGAGAGSGAGAGSGAGAGSGAGAGSGAGAGSGAGAGSGAGAGSGAGAGSGAGAGSGAGAGSGAGAGSGAGAGSGAGAGSGAGAGSGAGAGSGAGAGSGAGAGSGAGAGSGAGAGSGAGAGSGAGAGSGAGAGSGAGAGSGAGAGSGAGAGSGAGAGSGAGAGSGAGAGSGAGAGSGAGAGSGAGAGSGAGAGSGAGAGSGAGAGSGAGAGSGAGAGSGAGAGSGAGAGSGAGAGSGAGAGSGAGAGSGAGAGSGAGAGSGAGAGSGAGAGSGAGAGSGAGAGSGAGAGSGAGAGSGAGAGSGAGAGSGAGAGSGAGAGSGAGAGSGAGAGSGAGAGSGAGAGSGAGAGSGAGAGSGAGAGSGAGAGSGAGAGSGAGAGSGAGAGSGAGAGSGAGAGSGAGAGSGAGAGSGAGAGSGAGAGSGAGAGSGAGAGSGAGAGSGAGAGSGAGAGSGAGAGSGAGAGSGAGAGSGAGAGSGAGAGSGAGAGSGAGAGSGAGAGSGAGAGSGAGAGSGAGAGSGAGAGSGAGAGSGAGAGSGAGAGSGAGAGSGAGAGSGAGAGSGAGAGSGAGAGSGAGAGSGAGAGSGAGAGSGAGAGSGAGAGSGAGAGSGAGAGSGAGAGSGAGAGSGAGAGSGAGAGSGAGAGSGAGAGSGAGAGSGAGAGSGAGAGSGAGAGSGAGAGSGAGAGSGAGAGSGAGAGSGAGAGSGAGAGSGAGAGSGAGAGSGAGAGSGAGAGSGAGAGSGAGAGSGAGAGSGAGAGSGAGAGSGAGAGSGAGAGSGAGAGSGAGAGSGAGAGSGAGAGSGAGAGSGAGAGSGAGAGSGAGAGSGAGAGSGAGAGSGAGAGSGAGAGSGAGAGSGAGAGSGAGAGSGAGAGSGAGAGSGAGAGSGAGAGSGAGAGSGAGAGSGAGAGSGAGAGSGAGAGSGAGAGSGAGAGSGAGAGSGVGVPGVGVPGVGVPGVGVPGVGVPGVGVPGVGVPGVGVPGVGVPGVGVPGVGVPGVGVPGVGVPGVGVPGVGVPGVGVPGVGVPGVGVPGVGVPGVGVPGVGVPGVGVPGVGVPGVGVPGVGVPGVGVPGVGVPGVGVPGVGVPGVGVPGVGVPGVGVPGVGVPGVGVPGVGVPGVGVPGVGVPGVGVPGVGVPGVGVPGVGVPGVGVPGVGVPGVGVPGVGVPGVGVPGVGVPGVGVPGVGVPGVGVPGVGVPGVGVPGVGVPGVGVPGVGVPGVGVPGVGVPGVGVPGVGVPGVGVPGVGVPGVGVPGVGVPGVGVPGVGVPGVGVPGVGVPGVGVPGVGVPGVGVPGVGVPGVGVPGVGVPGVGVPGVGVPGVGVPGVGVPGVGVPGVGVPGVGVPGVGVPGVGVPGVGVPGVGVPGVGVPGVGVPGVGVPGVGVPGVGVPGVGVPGVGVPGVGVPGVGVPGVGVPGVGVPGVGVPGVGVPGVGVPGVGVPGVGVPGXGVPGVGVPGVGVPGVGVPGVGVPGVGVPGVGVPGVGVPGVGVPGVGVPGVGVPGVGVPGVGVPGVGVPGVGVPGVGVPGVGVPGVGVPGVGVPGVGVPGVGVPGVGVPGVGVPGVGVPGVGVPGVGVPGVGVPGVGVPGVGVPGVGVPGVGVPGVGVPGVGVPGVGVPGVGVPGVGVPGVGVPGVGVPGVGVPGVGVPGVGVPGVGVPGVGVPGVGVPGVGVPGVGVPGVGVPGVGVPGVGVPGVGVPGVGVPGVGVPGVGVPGVGVPGVGVPGVGVPGVGVPGVGVPGVGVPGVGVPGVGVPGVGVPGVGVPGVGVPGVGVPGVGVPGVGVPGVGVPGVGVPGVGVPGVGVPGVGVPGVGVPGVGVPGVGVPGVGVPGVGVPGVGVPGVGVPGVGVPGVGVPGVGVPGVGVPGVGVPGVGVPGVGVPGVGVPGVGVPGVGVPGVGVPGVGVPGVGVPGVGVPGVGVPGVGVPGVGVPGVGVPGVGVPGVGVPGVGVPGVGVPGAGAGSGAGAGSGAGAGSGAGAGSGAGAGSGAGAGSGAGAGSGAGAGSGAGAGSGAGAGSGAGAGSGAGAGSGAGAGSGAGAGSGAGAGSGAGAGSGAGAGSGAGAGSGAGAGSGAGAGSGAGAGSGAGAGSGAGAGSGAGAGSGAGAGSGAGAGSGAGAGSGAGAGSGAGAGSGAGAGSGAGAGSGAGAGSGAGAGSGAGAGSGAGAGSGAGAGSGAGAGSGAGAGSGAGAGSGAGAGSGAGAGSGAGAGSGAGAGSGAGAGSGAGAGSGAGAGSGAGAGSGAGAGSGAGAGSGAGAGSGAGAGSGAGAGSGAGAGSGAGAGSGAGAGSGAGAGSGAGAGSGAGAGSGAGAGSGAGAGSGAGAGSGAGAGSGAGAGSGAGAGSGAGAGSGAGAGSGAGAGSGAGAGSGAGAGSGAGAGSGAGAGSGAGAGSGAGAGSGAGAGSGAGAGSGAGAGSGAGAGSGAGAGSGAGAGSGAGAGSGAGAGSGAGAGSGAGAGSGAGAGSGAGAGSGAGAGSGAGAGSGAGAGSGAGAGSGAGAGSGAGAGSGAGAGSGAGAGSGAGAGSGAGAGSGAGAGSGAGAGSGAGAGSGAGAGSGAGAGSGAGAGSGAGAGSGAGAGSGAGAGSGAGAGSGAGAGSGAGAGSGAGAGSGAGAGSGAGAGSGAGAGSGAGAGSGAGAGSGAGAGSGAGAGSGAGAGSGAGAGSGAGAGSGAGAGSGAGAGSGAGAGSGAGAGSGAGAGSGAGAGSGAGAGSGAGAGSGAGAGSGAGAGSGAGAGSGAGAGSGAGAGSGAGAGSGAGAGSGAGAGSGAGAGSGAGAGSGAGAGSGAGAGSGAGAGSGAGAGSGAGAGSGAGAGSGAGAGSGAGAGSGAGAGSGAGAGSGAGAGSGAGAGSGAGAGSGAGAGSGAGAGSGAGAGSGAGAGSGAGAGSGAGAGSGAGAGSGAGAGSGAGAGSGAGAGSGAGAGSGAGAGSGAGAGSGAGAGSGAGAGSGAGAGSGAGAGSGAGAGSGAGAGSGAGAGSGAGAGSGAGAGSGAGAGSGAGAGSGAGAGSGAGAGSGAGAGSGAGAGSGAGAGSGAGAGSGAGAGSGAGAGSGAGAGSGAGAGSGAGAGSGAGAGSGAGAGSGAGAGSGAGAGSGAGAGSGAGAGSGAGAGSGAGAGSGAGAGSGAGAGSGAGAGSGAGAGSGAGAGSGAGAGSGAGAGSGAGAGSGAGAGSGVGVPGVGVPGVGVPGVGVPGVGVPGVGVPGVGVPGVGVPGVGVPGVGVPGVGVPGVGVPGVGVPGVGVPGVGVPGVGVPGVGVPGVGVPGVGVPGVGVPGVGVPGVGVPGVGVPGVGVPGVGVPGVGVPGVGVPGVGVPGVGVPGVGVPGVGVPGVGVPGVGVPGVGVPGVGVPGVGVPGVGVPGVGVPGVGVPGVGVPGVGVPGVGVPGVGVPGVGVPGVGVPGVGVPGVGVPGVGVPGVGVPGVGVPGVGVPGVGVPGVGVPGVGVPGVGVPGVGVPGVGVPGVGVPGVGVPGVGVPGVGVPGVGVPGVGVPGVGVPGVGVPGVGVPGVGVPGVGVPGVGVPGVGVPGVGVPGVGVPGVGVPGVGVPGVGVPGVGVPGVGVPGVGVPGVGVPGVGVPGVGVPGVGVPGVGVPGVGVPGVGVPGVGVPGVGVPGVGVPGVGVPGVGVPGVGVPGVGVPGVGVPGVGVPGVGVPGVGVPGVGVPGVGVPGVGVPGVGVPGXGVPGVGVPGVGVPGVGVPGVGVPGVGVPGVGVPGVGVPGVGVPGVGVPGVGVPGVGVPGVGVPGVGVPGVGVPGVGVPGVGVPGVGVPGVGVPGVGVPGVGVPGVGVPGVGVPGVGVPGVGVPGVGVPGVGVPGVGVPGVGVPGVGVPGVGVPGVGVPGVGVPGVGVPGVGVPGVGVPGVGVPGVGVPGVGVPGVGVPGVGVPGVGVPGVGVPGVGVPGVGVPGVGVPGVGVPGVGVPGVGVPGVGVPGVGVPGVGVPGVGVPGVGVPGVGVPGVGVPGVGVPGVGVPGVGVPGVGVPGVGVPGVGVPGVGVPGVGVPGVGVPGVGVPGVGVPGVGVPGVGVPGVGVPGVGVPGVGVPGVGVPGVGVPGVGVPGVGVPGVGVPGVGVPGVGVPGVGVPGVGVPGVGVPGVGVPGVGVPGVGVPGVGVPGVGVPGVGVPGVGVPGVGVPGVGVPGVGVPGVGVPGVGVPGVGVPGVGVPGVGVPGVGVPGVGVPGVGVPGVGVPGAGAGSGAGAGSGAGAGSGAGAGSGAGAGSGAGAGSGAGAGSGAGAGSGAGAGSGAGAGSGAGAGSGAGAGSGAGAGSGAGAGSGAGAGSGAGAGSGAGAGSGAGAGSGAGAGSGAGAGSGAGAGSGAGAGSGAGAGSGAGAGSGAGAGSGAGAGSGAGAGSGAGAGSGAGAGSGAGAGSGAGAGSGAGAGSGAGAGSGAGAGSGAGAGSGAGAGSGAGAGSGAGAGSGAGAGSGAGAGSGAGAGSGAGAGSGAGAGSGAGAGSGAGAGSGAGAGSGAGAGSGAGAGSGAGAGSGAGAGSGAGAGSGAGAGSGAGAGSGAGAGSGAGAGSGAGAGSGAGAGSGAGAGSGAGAGSGAGAGSGAGAGSGAGAGSGAGAGSGAGAGSGAGAGSGAGAGSGAGAGSGAGAGSGAGAGSGAGAGSGAGAGSGAGAGSGAGAGSGAGAGSGAGAGSGAGAGSGAGAGSGAGAGSGAGAGSGAGAGSGAGAGSGAGAGSGAGAGSGAGAGSGAGAGSGAGAGSGAGAGSGAGAGSGAGAGSGAGAGSGAGAGSGAGAGSGAGAGSGAGAGSGAGAGSGAGAGSGAGAGSGAGAGSGAGAGSGAGAGSGAGAGSGAGAGSGAGAGSGAGAGSGAGAGSGAGAGSGAGAGSGAGAGSGAGAGSGAGAGSGAGAGSGAGAGSGAGAGSGAGAGSGAGAGSGAGAGSGAGAGSGAGAGSGAGAGSGAGAGSGAGAGSGAGAGSGAGAGSGAGAGSGAGAGSGAGAGSGAGAGSGAGAGSGAGAGSGAGAGSGAGAGSGAGAGSGAGAGSGAGAGSGAGAGSGAGAGSGAGAGSGAGAGSGAGAGSGAGAGSGAGAGSGAGAGSGAGAGSGAGAGSGAGAGSGAGAGSGAGAGSGAGAGSGAGAGSGAGAGSGAGAGSGAGAGSGAGAGSGAGAGSGAGAGSGAGAGSGAGAGSGAGAGSGAGAGSGAGAGSGAGAGSGAGAGSGAGAGSGAGAGSGAGAGSGAGAGSGAGAGSGAGAGSGAGAGSGAGAGSGAGAGSGAGAGSGAGAGSGAGAGSGAGAGSGAGAGSGAGAGSGAGAGSGAGAGSGAGAGSGAGAGSGAGAGSGAGAGSGAGAGSGAGAGSGAGAGSGAGAGSGAGAGSGAGAGSGAGAGSGAGAGSGAGAGSGAGAGSGAGAGSGAGAGSGAGAGSGAGAGSGAGAGSGAGAGSGAGAGSGAGAGSGVGVPGVGVPGVGVPGVGVPGVGVPGVGVPGVGVPGVGVPGVGVPGVGVPGVGVPGVGVPGVGVPGVGVPGVGVPGVGVPGVGVPGVGVPGVGVPGVGVPGVGVPGVGVPGVGVPGVGVPGVGVPGVGVPGVGVPGVGVPGVGVPGVGVPGVGVPGVGVPGVGVPGVGVPGVGVPGVGVPGVGVPGVGVPGVGVPGVGVPGVGVPGVGVPGVGVPGVGVPGVGVPGVGVPGVGVPGVGVPGVGVPGVGVPGVGVPGVGVPGVGVPGVGVPGVGVPGVGVPGVGVPGVGVPGVGVPGVGVPGVGVPGVGVPGVGVPGVGVPGVGVPGVGVPGVGVPGVGVPGVGVPGVGVPGVGVPGVGVPGVGVPGVGVPGVGVPGVGVPGVGVPGVGVPGVGVPGVGVPGVGVPGVGVPGVGVPGVGVPGVGVPGVGVPGVGVPGVGVPGVGVPGVGVPGVGVPGVGVPGVGVPGVGVPGVGVPGVGVPGVGVPGVGVPGVGVPGVGVPGXGVPGVGVPGVGVPGVGVPGVGVPGVGVPGVGVPGVGVPGVGVPGVGVPGVGVPGVGVPGVGVPGVGVPGVGVPGVGVPGVGVPGVGVPGVGVPGVGVPGVGVPGVGVPGVGVPGVGVPGVGVPGVGVPGVGVPGVGVPGVGVPGVGVPGVGVPGVGVPGVGVPGVGVPGVGVPGVGVPGVGVPGVGVPGVGVPGVGVPGVGVPGVGVPGVGVPGVGVPGVGVPGVGVPGVGVPGVGVPGVGVPGVGVPGVGVPGVGVPGVGVPGVGVPGVGVPGVGVPGVGVPGVGVPGVGVPGVGVPGVGVPGVGVPGVGVPGVGVPGVGVPGVGVPGVGVPGVGVPGVGVPGVGVPGVGVPGVGVPGVGVPGVGVPGVGVPGVGVPGVGVPGVGVPGVGVPGVGVPGVGVPGVGVPGVGVPGVGVPGVGVPGVGVPGVGVPGVGVPGVGVPGVGVPGVGVPGVGVPGVGVPGVGVPGVGVPGVGVPGVGVPGVGVPGVGVPGVGVPGVGVPGAGAGSGAGAGSGAGAGSGAGAGSGAGAGSGAGAGSGAGAGSGAGAGSGAGAGSGAGAGSGAGAGSGAGAGSGAGAGSGAGAGSGAGAGSGAGAGSGAGAGSGAGAGSGAGAGSGAGAGSGAGAGSGAGAGSGAGAGSGAGAGSGAGAGSGAGAGSGAGAGSGAGAGSGAGAGSGAGAGSGAGAGSGAGAGSGAGAGSGAGAGSGAGAGSGAGAGSGAGAGSGAGAGSGAGAGSGAGAGSGAGAGSGAGAGSGAGAGSGAGAGSGAGAGSGAGAGSGAGAGSGAGAGSGAGAGSGAGAGSGAGAGSGAGAGSGAGAGSGAGAGSGAGAGSGAGAGSGAGAGSGAGAGSGAGAGSGAGAGSGAGAGSGAGAGSGAGAGSGAGAGSGAGAGSGAGAGSGAGAGSGAGAGSGAGAGSGAGAGSGAGAGSGAGAGSGAGAGSGAGAGSGAGAGSGAGAGSGAGAGSGAGAGSGAGAGSGAGAGSGAGAGSGAGAGSGAGAGSGAGAGSGAGAGSGAGAGSGAGAGSGAGAGSGAGAGSGAGAGSGAGAGSGAGAGSGAGAGSGAGAGSGAGAGSGAGAGSGAGAGSGAGAGSGAGAGSGAGAGSGAGAGSGAGAGSGAGAGSGAGAGSGAGAGSGAGAGSGAGAGSGAGAGSGAGAGSGAGAGSGAGAGSGAGAGSGAGAGSGAGAGSGAGAGSGAGAGSGAGAGSGAGAGSGAGAGSGAGAGSGAGAGSGAGAGSGAGAGSGAGAGSGAGAGSGAGAGSGAGAGSGAGAGSGAGAGSGAGAGSGAGAGSGAGAGSGAGAGSGAGAGSGAGAGSGAGAGSGAGAGSGAGAGSGAGAGSGAGAGSGAGAGSGAGAGSGAGAGSGAGAGSGAGAGSGAGAGSGAGAGSGAGAGSGAGAGSGAGAGSGAGAGSGAGAGSGAGAGSGAGAGSGAGAGSGAGAGSGAGAGSGAGAGSGAGAGSGAGAGSGAGAGSGAGAGSGAGAGSGAGAGSGAGAGSGAGAGSGAGAGSGAGAGSGAGAGSGAGAGSGAGAGSGAGAGSGAGAGSGAGAGSGAGAGSGAGAGSGAGAGSGAGAGSGAGAGSGAGAGSGAGAGSGAGAGSGAGAGSGAGAGSGAGAGSGAGAGSGAGAGSGAGAGSGAGAGSGAGAGSGAGAGSGAGAGSGAGAGSGAGAGSGAGAGSGAGAGSGAGAGSGAGAGSGAGAGSGAGAGSGAGAGSGVGVPGVGVPGVGVPGVGVPGVGVPGVGVPGVGVPGVGVPGVGVPGVGVPGVGVPGVGVPGVGVPGVGVPGVGVPGVGVPGVGVPGVGVPGVGVPGVGVPGVGVPGVGVPGVGVPGVGVPGVGVPGVGVPGVGVPGVGVPGVGVPGVGVPGVGVPGVGVPGVGVPGVGVPGVGVPGVGVPGVGVPGVGVPGVGVPGVGVPGVGVPGVGVPGVGVPGVGVPGVGVPGVGVPGVGVPGVGVPGVGVPGVGVPGVGVPGVGVPGVGVPGVGVPGVGVPGVGVPGVGVPGVGVPGVGVPGVGVPGVGVPGVGVPGVGVPGVGVPGVGVPGVGVPGVGVPGVGVPGVGVPGVGVPGVGVPGVGVPGVGVPGVGVPGVGVPGVGVPGVGVPGVGVPGVGVPGVGVPGVGVPGVGVPGVGVPGVGVPGVGVPGVGVPGVGVPGVGVPGVGVPGVGVPGVGVPGVGVPGVGVPGVGVPGVGVPGVGVPGVGVPGVGVPGVGVPGVGVPGXGVPGVGVPGVGVPGVGVPGVGVPGVGVPGVGVPGVGVPGVGVPGVGVPGVGVPGVGVPGVGVPGVGVPGVGVPGVGVPGVGVPGVGVPGVGVPGVGVPGVGVPGVGVPGVGVPGVGVPGVGVPGVGVPGVGVPGVGVPGVGVPGVGVPGVGVPGVGVPGVGVPGVGVPGVGVPGVGVPGVGVPGVGVPGVGVPGVGVPGVGVPGVGVPGVGVPGVGVPGVGVPGVGVPGVGVPGVGVPGVGVPGVGVPGVGVPGVGVPGVGVPGVGVPGVGVPGVGVPGVGVPGVGVPGVGVPGVGVPGVGVPGVGVPGVGVPGVGVPGVGVPGVGVPGVGVPGVGVPGVGVPGVGVPGVGVPGVGVPGVGVPGVGVPGVGVPGVGVPGVGVPGVGVPGVGVPGVGVPGVGVPGVGVPGVGVPGVGVPGVGVPGVGVPGVGVPGVGVPGVGVPGVGVPGVGVPGVGVPGVGVPGVGVPGVGVPGVGVPGVGVPGVGVPGVGVPGVGVPGVGVPGAGAGSGAGAGSGAGAGSGAGAGSGAGAGSGAGAGSGAGAGSGAGAGSGAGAGSGAGAGSGAGAGSGAGAGSGAGAGSGAGAGSGAGAGSGAGAGSGAGAGSGAGAGSGAGAGSGAGAGSGAGAGSGAGAGSGAGAGSGAGAGSGAGAGSGAGAGSGAGAGSGAGAGSGAGAGSGAGAGSGAGAGSGAGAGSGAGAGSGAGAGSGAGAGSGAGAGSGAGAGSGAGAGSGAGAGSGAGAGSGAGAGSGAGAGSGAGAGSGAGAGSGAGAGSGAGAGSGAGAGSGAGAGSGAGAGSGAGAGSGAGAGSGAGAGSGAGAGSGAGAGSGAGAGSGAGAGSGAGAGSGAGAGSGAGAGSGAGAGSGAGAGSGAGAGSGAGAGSGAGAGSGAGAGSGAGAGSGAGAGSGAGAGSGAGAGSGAGAGSGAGAGSGAGAGSGAGAGSGAGAGSGAGAGSGAGAGSGAGAGSGAGAGSGAGAGSGAGAGSGAGAGSGAGAGSGAGAGSGAGAGSGAGAGSGAGAGSGAGAGSGAGAGSGAGAGSGAGAGSGAGAGSGAGAGSGAGAGSGAGAGSGAGAGSGAGAGSGAGAGSGAGAGSGAGAGSGAGAGSGAGAGSGAGAGSGAGAGSGAGAGSGAGAGSGAGAGSGAGAGSGAGAGSGAGAGSGAGAGSGAGAGSGAGAGSGAGAGSGAGAGSGAGAGSGAGAGSGAGAGSGAGAGSGAGAGSGAGAGSGAGAGSGAGAGSGAGAGSGAGAGSGAGAGSGAGAGSGAGAGSGAGAGSGAGAGSGAGAGSGAGAGSGAGAGSGAGAGSGAGAGSGAGAGSGAGAGSGAGAGSGAGAGSGAGAGSGAGAGSGAGAGSGAGAGSGAGAGSGAGAGSGAGAGSGAGAGSGAGAGSGAGAGSGAGAGSGAGAGSGAGAGSGAGAGSGAGAGSGAGAGSGAGAGSGAGAGSGAGAGSGAGAGSGAGAGSGAGAGSGAGAGSGAGAGSGAGAGSGAGAGSGAGAGSGAGAGSGAGAGSGAGAGSGAGAGSGAGAGSGAGAGSGAGAGSGAGAGSGAGAGSGAGAGSGAGAGSGAGAGSGAGAGSGAGAGSGAGAGSGAGAGSGAGAGSGAGAGSGAGAGSGAGAGSGAGAGSGAGAGSGAGAGSGAGAGSGAGAGSGAGAGSGAGAGSGAGAGSGAGAGSGAGAGSGAGAGSGAGAGSGAGAGSGAGAGSGAGAGSGAGAGSGVGVPGVGVPGVGVPGVGVPGVGVPGVGVPGVGVPGVGVPGVGVPGVGVPGVGVPGVGVPGVGVPGVGVPGVGVPGVGVPGVGVPGVGVPGVGVPGVGVPGVGVPGVGVPGVGVPGVGVPGVGVPGVGVPGVGVPGVGVPGVGVPGVGVPGVGVPGVGVPGVGVPGVGVPGVGVPGVGVPGVGVPGVGVPGVGVPGVGVPGVGVPGVGVPGVGVPGVGVPGVGVPGVGVPGVGVPGVGVPGVGVPGVGVPGVGVPGVGVPGVGVPGVGVPGVGVPGVGVPGVGVPGVGVPGVGVPGVGVPGVGVPGVGVPGVGVPGVGVPGVGVPGVGVPGVGVPGVGVPGVGVPGVGVPGVGVPGVGVPGVGVPGVGVPGVGVPGVGVPGVGVPGVGVPGVGVPGVGVPGVGVPGVGVPGVGVPGVGVPGVGVPGVGVPGVGVPGVGVPGVGVPGVGVPGVGVPGVGVPGVGVPGVGVPGVGVPGVGVPGVGVPGVGVPGVGVPGVGVPGXGVPGVGVPGVGVPGVGVPGVGVPGVGVPGVGVPGVGVPGVGVPGVGVPGVGVPGVGVPGVGVPGVGVPGVGVPGVGVPGVGVPGVGVPGVGVPGVGVPGVGVPGVGVPGVGVPGVGVPGVGVPGVGVPGVGVPGVGVPGVGVPGVGVPGVGVPGVGVPGVGVPGVGVPGVGVPGVGVPGVGVPGVGVPGVGVPGVGVPGVGVPGVGVPGVGVPGVGVPGVGVPGVGVPGVGVPGVGVPGVGVPGVGVPGVGVPGVGVPGVGVPGVGVPGVGVPGVGVPGVGVPGVGVPGVGVPGVGVPGVGVPGVGVPGVGVPGVGVPGVGVPGVGVPGVGVPGVGVPGVGVPGVGVPGVGVPGVGVPGVGVPGVGVPGVGVPGVGVPGVGVPGVGVPGVGVPGVGVPGVGVPGVGVPGVGVPGVGVPGVGVPGVGVPGVGVPGVGVPGVGVPGVGVPGVGVPGVGVPGVGVPGVGVPGVGVPGVGVPGVGVPGVGVPGVGVPGVGVPGVGVPGAGAGSGAGAGSGAGAGSGAGAGSGAGAGSGAGAGSGAGAGSGAGAGSGAGAGSGAGAGSGAGAGSGAGAGSGAGAGSGAGAGSGAGAGSGAGAGSGAGAGSGAGAGSGAGAGSGAGAGSGAGAGSGAGAGSGAGAGSGAGAGSGAGAGSGAGAGSGAGAGSGAGAGSGAGAGSGAGAGSGAGAGSGAGAGSGAGAGSGAGAGSGAGAGSGAGAGSGAGAGSGAGAGSGAGAGSGAGAGSGAGAGSGAGAGSGAGAGSGAGAGSGAGAGSGAGAGSGAGAGSGAGAGSGAGAGSGAGAGSGAGAGSGAGAGSGAGAGSGAGAGSGAGAGSGAGAGSGAGAGSGAGAGSGAGAGSGAGAGSGAGAGSGAGAGSGAGAGSGAGAGSGAGAGSGAGAGSGAGAGSGAGAGSGAGAGSGAGAGSGAGAGSGAGAGSGAGAGSGAGAGSGAGAGSGAGAGSGAGAGSGAGAGSGAGAGSGAGAGSGAGAGSGAGAGSGAGAGSGAGAGSGAGAGSGAGAGSGAGAGSGAGAGSGAGAGSGAGAGSGAGAGSGAGAGSGAGAGSGAGAGSGAGAGSGAGAGSGAGAGSGAGAGSGAGAGSGAGAGSGAGAGSGAGAGSGAGAGSGAGAGSGAGAGSGAGAGSGAGAGSGAGAGSGAGAGSGAGAGSGAGAGSGAGAGSGAGAGSGAGAGSGAGAGSGAGAGSGAGAGSGAGAGSGAGAGSGAGAGSGAGAGSGAGAGSGAGAGSGAGAGSGAGAGSGAGAGSGAGAGSGAGAGSGAGAGSGAGAGSGAGAGSGAGAGSGAGAGSGAGAGSGAGAGSGAGAGSGAGAGSGAGAGSGAGAGSGAGAGSGAGAGSGAGAGSGAGAGSGAGAGSGAGAGSGAGAGSGAGAGSGAGAGSGAGAGSGAGAGSGAGAGSGAGAGSGAGAGSGAGAGSGAGAGSGAGAGSGAGAGSGAGAGSGAGAGSGAGAGSGAGAGSGAGAGSGAGAGSGAGAGSGAGAGSGAGAGSGAGAGSGAGAGSGAGAGSGAGAGSGAGAGSGAGAGSGAGAGSGAGAGSGAGAGSGAGAGSGAGAGSGAGAGSGAGAGSGAGAGSGAGAGSGAGAGSGAGAGSGAGAGSGAGAGSGAGAGSGAGAGSGAGAGSGAGAGSGAGAGSGAGAGSGAGAGSGAGAGSGAGAGSGAGAGSGAGAGSGAGAGSGAGAGSGAGAGSGAGAGSGAGAGSGVGVPGVGVPGVGVPGVGVPGVGVPGVGVPGVGVPGVGVPGVGVPGVGVPGVGVPGVGVPGVGVPGVGVPGVGVPGVGVPGVGVPGVGVPGVGVPGVGVPGVGVPGVGVPGVGVPGVGVPGVGVPGVGVPGVGVPGVGVPGVGVPGVGVPGVGVPGVGVPGVGVPGVGVPGVGVPGVGVPGVGVPGVGVPGVGVPGVGVPGVGVPGVGVPGVGVPGVGVPGVGVPGVGVPGVGVPGVGVPGVGVPGVGVPGVGVPGVGVPGVGVPGVGVPGVGVPGVGVPGVGVPGVGVPGVGVPGVGVPGVGVPGVGVPGVGVPGVGVPGVGVPGVGVPGVGVPGVGVPGVGVPGVGVPGVGVPGVGVPGVGVPGVGVPGVGVPGVGVPGVGVPGVGVPGVGVPGVGVPGVGVPGVGVPGVGVPGVGVPGVGVPGVGVPGVGVPGVGVPGVGVPGVGVPGVGVPGVGVPGVGVPGVGVPGVGVPGVGVPGVGVPGVGVPGVGVPGVGVPGXGVPGVGVPGVGVPGVGVPGVGVPGVGVPGVGVPGVGVPGVGVPGVGVPGVGVPGVGVPGVGVPGVGVPGVGVPGVGVPGVGVPGVGVPGVGVPGVGVPGVGVPGVGVPGVGVPGVGVPGVGVPGVGVPGVGVPGVGVPGVGVPGVGVPGVGVPGVGVPGVGVPGVGVPGVGVPGVGVPGVGVPGVGVPGVGVPGVGVPGVGVPGVGVPGVGVPGVGVPGVGVPGVGVPGVGVPGVGVPGVGVPGVGVPGVGVPGVGVPGVGVPGVGVPGVGVPGVGVPGVGVPGVGVPGVGVPGVGVPGVGVPGVGVPGVGVPGVGVPGVGVPGVGVPGVGVPGVGVPGVGVPGVGVPGVGVPGVGVPGVGVPGVGVPGVGVPGVGVPGVGVPGVGVPGVGVPGVGVPGVGVPGVGVPGVGVPGVGVPGVGVPGVGVPGVGVPGVGVPGVGVPGVGVPGVGVPGVGVPGVGVPGVGVPGVGVPGVGVPGVGVPGVGVPGVGVPGVGVPGVGVPGAGAGSGAGAGSGAGAGSGAGAGSGAGAGSGAGAGSGAGAGSGAGAGSGAGAGSGAGAGSGAGAGSGAGAGSGAGAGSGAGAGSGAGAGSGAGAGSGAGAGSGAGAGSGAGAGSGAGAGSGAGAGSGAGAGSGAGAGSGAGAGSGAGAGSGAGAGSGAGAGSGAGAGSGAGAGSGAGAGSGAGAGSGAGAGSGAGAGSGAGAGSGAGAGSGAGAGSGAGAGSGAGAGSGAGAGSGAGAGSGAGAGSGAGAGSGAGAGSGAGAGSGAGAGSGAGAGSGAGAGSGAGAGSGAGAGSGAGAGSGAGAGSGAGAGSGAGAGSGAGAGSGAGAGSGAGAGSGAGAGSGAGAGSGAGAGSGAGAGSGAGAGSGAGAGSGAGAGSGAGAGSGAGAGSGAGAGSGAGAGSGAGAGSGAGAGSGAGAGSGAGAGSGAGAGSGAGAGSGAGAGSGAGAGSGAGAGSGAGAGSGAGAGSGAGAGSGAGAGSGAGAGSGAGAGSGAGAGSGAGAGSGAGAGSGAGAGSGAGAGSGAGAGSGAGAGSGAGAGSGAGAGSGAGAGSGAGAGSGAGAGSGAGAGSGAGAGSGAGAGSGAGAGSGAGAGSGAGAGSGAGAGSGAGAGSGAGAGSGAGAGSGAGAGSGAGAGSGAGAGSGAGAGSGAGAGSGAGAGSGAGAGSGAGAGSGAGAGSGAGAGSGAGAGSGAGAGSGAGAGSGAGAGSGAGAGSGAGAGSGAGAGSGAGAGSGAGAGSGAGAGSGAGAGSGAGAGSGAGAGSGAGAGSGAGAGSGAGAGSGAGAGSGAGAGSGAGAGSGAGAGSGAGAGSGAGAGSGAGAGSGAGAGSGAGAGSGAGAGSGAGAGSGAGAGSGAGAGSGAGAGSGAGAGSGAGAGSGAGAGSGAGAGSGAGAGSGAGAGSGAGAGSGAGAGSGAGAGSGAGAGSGAGAGSGAGAGSGAGAGSGAGAGSGAGAGSGAGAGSGAGAGSGAGAGSGAGAGSGAGAGSGAGAGSGAGAGSGAGAGSGAGAGSGAGAGSGAGAGSGAGAGSGAGAGSGAGAGSGAGAGSGAGAGSGAGAGSGAGAGSGAGAGSGAGAGSGAGAGSGAGAGSGAGAGSGAGAGSGAGAGSGAGAGSGAGAGSGAGAGSGAGAGSGAGAGSGAGAGSGAGAGSGAGAGSGAGAGSGAGAGSGAGAGSGAGAGSGAGAGSGAGAGSGAGAGSGAGAGSGAGAGSGVGVPGVGVPGVGVPGVGVPGVGVPGVGVPGVGVPGVGVPGVGVPGVGVPGVGVPGVGVPGVGVPGVGVPGVGVPGVGVPGVGVPGVGVPGVGVPGVGVPGVGVPGVGVPGVGVPGVGVPGVGVPGVGVPGVGVPGVGVPGVGVPGVGVPGVGVPGVGVPGVGVPGVGVPGVGVPGVGVPGVGVPGVGVPGVGVPGVGVPGVGVPGVGVPGVGVPGVGVPGVGVPGVGVPGVGVPGVGVPGVGVPGVGVPGVGVPGVGVPGVGVPGVGVPGVGVPGVGVPGVGVPGVGVPGVGVPGVGVPGVGVPGVGVPGVGVPGVGVPGVGVPGVGVPGVGVPGVGVPGVGVPGVGVPGVGVPGVGVPGVGVPGVGVPGVGVPGVGVPGVGVPGVGVPGVGVPGVGVPGVGVPGVGVPGVGVPGVGVPGVGVPGVGVPGVGVPGVGVPGVGVPGVGVPGVGVPGVGVPGVGVPGVGVPGVGVPGVGVPGVGVPGVGVPGVGVPGVGVPGXGVPGVGVPGVGVPGVGVPGVGVPGVGVPGVGVPGVGVPGVGVPGVGVPGVGVPGVGVPGVGVPGVGVPGVGVPGVGVPGVGVPGVGVPGVGVPGVGVPGVGVPGVGVPGVGVPGVGVPGVGVPGVGVPGVGVPGVGVPGVGVPGVGVPGVGVPGVGVPGVGVPGVGVPGVGVPGVGVPGVGVPGVGVPGVGVPGVGVPGVGVPGVGVPGVGVPGVGVPGVGVPGVGVPGVGVPGVGVPGVGVPGVGVPGVGVPGVGVPGVGVPGVGVPGVGVPGVGVPGVGVPGVGVPGVGVPGVGVPGVGVPGVGVPGVGVPGVGVPGVGVPGVGVPGVGVPGVGVPGVGVPGVGVPGVGVPGVGVPGVGVPGVGVPGVGVPGVGVPGVGVPGVGVPGVGVPGVGVPGVGVPGVGVPGVGVPGVGVPGVGVPGVGVPGVGVPGVGVPGVGVPGVGVPGVGVPGVGVPGVGVPGVGVPGVGVPGVGVPGVGVPGVGVPGVGVPGVGVPGVGVPGAGAGSGAGAGSGAGAGSGAGAGSGAGAGSGAGAGSGAGAGSGAGAGSGAGAGSGAGAGSGAGAGSGAGAGSGAGAGSGAGAGSGAGAGSGAGAGSGAGAGSGAGAGSGAGAGSGAGAGSGAGAGSGAGAGSGAGAGSGAGAGSGAGAGSGAGAGSGAGAGSGAGAGSGAGAGSGAGAGSGAGAGSGAGAGSGAGAGSGAGAGSGAGAGSGAGAGSGAGAGSGAGAGSGAGAGSGAGAGSGAGAGSGAGAGSGAGAGSGAGAGSGAGAGSGAGAGSGAGAGSGAGAGSGAGAGSGAGAGSGAGAGSGAGAGSGAGAGSGAGAGSGAGAGSGAGAGSGAGAGSGAGAGSGAGAGSGAGAGSGAGAGSGAGAGSGAGAGSGAGAGSGAGAGSGAGAGSGAGAGSGAGAGSGAGAGSGAGAGSGAGAGSGAGAGSGAGAGSGAGAGSGAGAGSGAGAGSGAGAGSGAGAGSGAGAGSGAGAGSGAGAGSGAGAGSGAGAGSGAGAGSGAGAGSGAGAGSGAGAGSGAGAGSGAGAGSGAGAGSGAGAGSGAGAGSGAGAGSGAGAGSGAGAGSGAGAGSGAGAGSGAGAGSGAGAGSGAGAGSGAGAGSGAGAGSGAGAGSGAGAGSGAGAGSGAGAGSGAGAGSGAGAGSGAGAGSGAGAGSGAGAGSGAGAGSGAGAGSGAGAGSGAGAGSGAGAGSGAGAGSGAGAGSGAGAGSGAGAGSGAGAGSGAGAGSGAGAGSGAGAGSGAGAGSGAGAGSGAGAGSGAGAGSGAGAGSGAGAGSGAGAGSGAGAGSGAGAGSGAGAGSGAGAGSGAGAGSGAGAGSGAGAGSGAGAGSGAGAGSGAGAGSGAGAGSGAGAGSGAGAGSGAGAGSGAGAGSGAGAGSGAGAGSGAGAGSGAGAGSGAGAGSGAGAGSGAGAGSGAGAGSGAGAGSGAGAGSGAGAGSGAGAGSGAGAGSGAGAGSGAGAGSGAGAGSGAGAGSGAGAGSGAGAGSGAGAGSGAGAGSGAGAGSGAGAGSGAGAGSGAGAGSGAGAGSGAGAGSGAGAGSGAGAGSGAGAGSGAGAGSGAGAGSGAGAGSGAGAGSGAGAGSGAGAGSGAGAGSGAGAGSGAGAGSGAGAGSGAGAGSGAGAGSGAGAGSGAGAGSGAGAGSGAGAGSGAGAGSGAGAGSGAGAGSGAGAGSGAGAGSGAGAGSGAGAGSGAGAGSGAGAGSGVGVPGVGVPGVGVPGVGVPGVGVPGVGVPGVGVPGVGVPGVGVPGVGVPGVGVPGVGVPGVGVPGVGVPGVGVPGVGVPGVGVPGVGVPGVGVPGVGVPGVGVPGVGVPGVGVPGVGVPGVGVPGVGVPGVGVPGVGVPGVGVPGVGVPGVGVPGVGVPGVGVPGVGVPGVGVPGVGVPGVGVPGVGVPGVGVPGVGVPGVGVPGVGVPGVGVPGVGVPGVGVPGVGVPGVGVPGVGVPGVGVPGVGVPGVGVPGVGVPGVGVPGVGVPGVGVPGVGVPGVGVPGVGVPGVGVPGVGVPGVGVPGVGVPGVGVPGVGVPGVGVPGVGVPGVGVPGVGVPGVGVPGVGVPGVGVPGVGVPGVGVPGVGVPGVGVPGVGVPGVGVPGVGVPGVGVPGVGVPGVGVPGVGVPGVGVPGVGVPGVGVPGVGVPGVGVPGVGVPGVGVPGVGVPGVGVPGVGVPGVGVPGVGVPGVGVPGVGVPGVGVPGVGVPGVGVPGVGVPGXGVPGVGVPGVGVPGVGVPGVGVPGVGVPGVGVPGVGVPGVGVPGVGVPGVGVPGVGVPGVGVPGVGVPGVGVPGVGVPGVGVPGVGVPGVGVPGVGVPGVGVPGVGVPGVGVPGVGVPGVGVPGVGVPGVGVPGVGVPGVGVPGVGVPGVGVPGVGVPGVGVPGVGVPGVGVPGVGVPGVGVPGVGVPGVGVPGVGVPGVGVPGVGVPGVGVPGVGVPGVGVPGVGVPGVGVPGVGVPGVGVPGVGVPGVGVPGVGVPGVGVPGVGVPGVGVPGVGVPGVGVPGVGVPGVGVPGVGVPGVGVPGVGVPGVGVPGVGVPGVGVPGVGVPGVGVPGVGVPGVGVPGVGVPGVGVPGVGVPGVGVPGVGVPGVGVPGVGVPGVGVPGVGVPGVGVPGVGVPGVGVPGVGVPGVGVPGVGVPGVGVPGVGVPGVGVPGVGVPGVGVPGVGVPGVGVPGVGVPGVGVPGVGVPGVGVPGVGVPGVGVPGVGVPGVGVPGVGVPGVGVPGAGAGSGAGAGSGAGAGSGAGAGSGAGAGSGAGAGSGAGAGSGAGAGSGAGAGSGAGAGSGAGAGSGAGAGSGAGAGSGAGAGSGAGAGSGAGAGSGAGAGSGAGAGSGAGAGSGAGAGSGAGAGSGAGAGSGAGAGSGAGAGSGAGAGSGAGAGSGAGAGSGAGAGSGAGAGSGAGAGSGAGAGSGAGAGSGAGAGSGAGAGSGAGAGSGAGAGSGAGAGSGAGAGSGAGAGSGAGAGSGAGAGSGAGAGSGAGAGSGAGAGSGAGAGSGAGAGSGAGAGSGAGAGSGAGAGSGAGAGSGAGAGSGAGAGSGAGAGSGAGAGSGAGAGSGAGAGSGAGAGSGAGAGSGAGAGSGAGAGSGAGAGSGAGAGSGAGAGSGAGAGSGAGAGSGAGAGSGAGAGSGAGAGSGAGAGSGAGAGSGAGAGSGAGAGSGAGAGSGAGAGSGAGAGSGAGAGSGAGAGSGAGAGSGAGAGSGAGAGSGAGAGSGAGAGSGAGAGSGAGAGSGAGAGSGAGAGSGAGAGSGAGAGSGAGAGSGAGAGSGAGAGSGAGAGSGAGAGSGAGAGSGAGAGSGAGAGSGAGAGSGAGAGSGAGAGSGAGAGSGAGAGSGAGAGSGAGAGSGAGAGSGAGAGSGAGAGSGAGAGSGAGAGSGAGAGSGAGAGSGAGAGSGAGAGSGAGAGSGAGAGSGAGAGSGAGAGSGAGAGSGAGAGSGAGAGSGAGAGSGAGAGSGAGAGSGAGAGSGAGAGSGAGAGSGAGAGSGAGAGSGAGAGSGAGAGSGAGAGSGAGAGSGAGAGSGAGAGSGAGAGSGAGAGSGAGAGSGAGAGSGAGAGSGAGAGSGAGAGSGAGAGSGAGAGSGAGAGSGAGAGSGAGAGSGAGAGSGAGAGSGAGAGSGAGAGSGAGAGSGAGAGSGAGAGSGAGAGSGAGAGSGAGAGSGAGAGSGAGAGSGAGAGSGAGAGSGAGAGSGAGAGSGAGAGSGAGAGSGAGAGSGAGAGSGAGAGSGAGAGSGAGAGSGAGAGSGAGAGSGAGAGSGAGAGSGAGAGSGAGAGSGAGAGSGAGAGSGAGAGSGAGAGSGAGAGSGAGAGSGAGAGSGAGAGSGAGAGSGAGAGSGAGAGSGAGAGSGAGAGSGAGAGSGAGAGSGAGAGSGAGAGSGAGAGSGAGAGSGAGAGSGAGAGSGAGAGSGAGAGSGAGAGSGAGAGSGAGAGSGAGAGSGVGVPGVGVPGVGVPGVGVPGVGVPGVGVPGVGVPGVGVPGVGVPGVGVPGVGVPGVGVPGVGVPGVGVPGVGVPGVGVPGVGVPGVGVPGVGVPGVGVPGVGVPGVGVPGVGVPGVGVPGVGVPGVGVPGVGVPGVGVPGVGVPGVGVPGVGVPGVGVPGVGVPGVGVPGVGVPGVGVPGVGVPGVGVPGVGVPGVGVPGVGVPGVGVPGVGVPGVGVPGVGVPGVGVPGVGVPGVGVPGVGVPGVGVPGVGVPGVGVPGVGVPGVGVPGVGVPGVGVPGVGVPGVGVPGVGVPGVGVPGVGVPGVGVPGVGVPGVGVPGVGVPGVGVPGVGVPGVGVPGVGVPGVGVPGVGVPGVGVPGVGVPGVGVPGVGVPGVGVPGVGVPGVGVPGVGVPGVGVPGVGVPGVGVPGVGVPGVGVPGVGVPGVGVPGVGVPGVGVPGVGVPGVGVPGVGVPGVGVPGVGVPGVGVPGVGVPGVGVPGVGVPGVGVPGVGVPGVGVPGXGVPGVGVPGVGVPGVGVPGVGVPGVGVPGVGVPGVGVPGVGVPGVGVPGVGVPGVGVPGVGVPGVGVPGVGVPGVGVPGVGVPGVGVPGVGVPGVGVPGVGVPGVGVPGVGVPGVGVPGVGVPGVGVPGVGVPGVGVPGVGVPGVGVPGVGVPGVGVPGVGVPGVGVPGVGVPGVGVPGVGVPGVGVPGVGVPGVGVPGVGVPGVGVPGVGVPGVGVPGVGVPGVGVPGVGVPGVGVPGVGVPGVGVPGVGVPGVGVPGVGVPGVGVPGVGVPGVGVPGVGVPGVGVPGVGVPGVGVPGVGVPGVGVPGVGVPGVGVPGVGVPGVGVPGVGVPGVGVPGVGVPGVGVPGVGVPGVGVPGVGVPGVGVPGVGVPGVGVPGVGVPGVGVPGVGVPGVGVPGVGVPGVGVPGVGVPGVGVPGVGVPGVGVPGVGVPGVGVPGVGVPGVGVPGVGVPGVGVPGVGVPGVGVPGVGVPGVGVPGVGVPGVGVPGVGVPGVGVPGVGVPGAGAGSGAGAGSGAGAGSGAGAGSGAGAGSGAGAGSGAGAGSGAGAGSGAGAGSGAGAGSGAGAGSGAGAGSGAGAGSGAGAGSGAGAGSGAGAGSGAGAGSGAGAGSGAGAGSGAGAGSGAGAGSGAGAGSGAGAGSGAGAGSGAGAGSGAGAGSGAGAGSGAGAGSGAGAGSGAGAGSGAGAGSGAGAGSGAGAGSGAGAGSGAGAGSGAGAGSGAGAGSGAGAGSGAGAGSGAGAGSGAGAGSGAGAGSGAGAGSGAGAGSGAGAGSGAGAGSGAGAGSGAGAGSGAGAGSGAGAGSGAGAGSGAGAGSGAGAGSGAGAGSGAGAGSGAGAGSGAGAGSGAGAGSGAGAGSGAGAGSGAGAGSGAGAGSGAGAGSGAGAGSGAGAGSGAGAGSGAGAGSGAGAGSGAGAGSGAGAGSGAGAGSGAGAGSGAGAGSGAGAGSGAGAGSGAGAGSGAGAGSGAGAGSGAGAGSGAGAGSGAGAGSGAGAGSGAGAGSGAGAGSGAGAGSGAGAGSGAGAGSGAGAGSGAGAGSGAGAGSGAGAGSGAGAGSGAGAGSGAGAGSGAGAGSGAGAGSGAGAGSGAGAGSGAGAGSGAGAGSGAGAGSGAGAGSGAGAGSGAGAGSGAGAGSGAGAGSGAGAGSGAGAGSGAGAGSGAGAGSGAGAGSGAGAGSGAGAGSGAGAGSGAGAGSGAGAGSGAGAGSGAGAGSGAGAGSGAGAGSGAGAGSGAGAGSGAGAGSGAGAGSGAGAGSGAGAGSGAGAGSGAGAGSGAGAGSGAGAGSGAGAGSGAGAGSGAGAGSGAGAGSGAGAGSGAGAGSGAGAGSGAGAGSGAGAGSGAGAGSGAGAGSGAGAGSGAGAGSGAGAGSGAGAGSGAGAGSGAGAGSGAGAGSGAGAGSGAGAGSGAGAGSGAGAGSGAGAGSGAGAGSGAGAGSGAGAGSGAGAGSGAGAGSGAGAGSGAGAGSGAGAGSGAGAGSGAGAGSGAGAGSGAGAGSGAGAGSGAGAGSGAGAGSGAGAGSGAGAGSGAGAGSGAGAGSGAGAGSGAGAGSGAGAGSGAGAGSGAGAGSGAGAGSGAGAGSGAGAGSGAGAGSGAGAGSGAGAGSGAGAGSGAGAGSGAGAGSGAGAGSGAGAGSGAGAGSGAGAGSGAGAGSGAGAGSGAGAGSGAGAGSGAGAGSGAGAGSGAGAGSGAGAGSGAGAGSGAGAGSGAGAGSGVGVPGVGVPGVGVPGVGVPGVGVPGVGVPGVGVPGVGVPGVGVPGVGVPGVGVPGVGVPGVGVPGVGVPGVGVPGVGVPGVGVPGVGVPGVGVPGVGVPGVGVPGVGVPGVGVPGVGVPGVGVPGVGVPGVGVPGVGVPGVGVPGVGVPGVGVPGVGVPGVGVPGVGVPGVGVPGVGVPGVGVPGVGVPGVGVPGVGVPGVGVPGVGVPGVGVPGVGVPGVGVPGVGVPGVGVPGVGVPGVGVPGVGVPGVGVPGVGVPGVGVPGVGVPGVGVPGVGVPGVGVPGVGVPGVGVPGVGVPGVGVPGVGVPGVGVPGVGVPGVGVPGVGVPGVGVPGVGVPGVGVPGVGVPGVGVPGVGVPGVGVPGVGVPGVGVPGVGVPGVGVPGVGVPGVGVPGVGVPGVGVPGVGVPGVGVPGVGVPGVGVPGVGVPGVGVPGVGVPGVGVPGVGVPGVGVPGVGVPGVGVPGVGVPGVGVPGVGVPGVGVPGVGVPGVGVPGVGVPGXGVPGVGVPGVGVPGVGVPGVGVPGVGVPGVGVPGVGVPGVGVPGVGVPGVGVPGVGVPGVGVPGVGVPGVGVPGVGVPGVGVPGVGVPGVGVPGVGVPGVGVPGVGVPGVGVPGVGVPGVGVPGVGVPGVGVPGVGVPGVGVPGVGVPGVGVPGVGVPGVGVPGVGVPGVGVPGVGVPGVGVPGVGVPGVGVPGVGVPGVGVPGVGVPGVGVPGVGVPGVGVPGVGVPGVGVPGVGVPGVGVPGVGVPGVGVPGVGVPGVGVPGVGVPGVGVPGVGVPGVGVPGVGVPGVGVPGVGVPGVGVPGVGVPGVGVPGVGVPGVGVPGVGVPGVGVPGVGVPGVGVPGVGVPGVGVPGVGVPGVGVPGVGVPGVGVPGVGVPGVGVPGVGVPGVGVPGVGVPGVGVPGVGVPGVGVPGVGVPGVGVPGVGVPGVGVPGVGVPGVGVPGVGVPGVGVPGVGVPGVGVPGVGVPGVGVPGVGVPGVGVPGVGVPGVGVPGVGVPGVGVPGAGAGSGAGAGSGAGAGSGAGAGSGAGAGSGAGAGSGAGAGSGAGAGSGAGAGSGAGAGSGAGAGSGAGAGSGAGAGSGAGAGSGAGAGSGAGAGSGAGAGSGAGAGSGAGAGSGAGAGSGAGAGSGAGAGSGAGAGSGAGAGSGAGAGSGAGAGSGAGAGSGAGAGSGAGAGSGAGAGSGAGAGSGAGAGSGAGAGSGAGAGSGAGAGSGAGAGSGAGAGSGAGAGSGAGAGSGAGAGSGAGAGSGAGAGSGAGAGSGAGAGSGAGAGSGAGAGSGAGAGSGAGAGSGAGAGSGAGAGSGAGAGSGAGAGSGAGAGSGAGAGSGAGAGSGAGAGSGAGAGSGAGAGSGAGAGSGAGAGSGAGAGSGAGAGSGAGAGSGAGAGSGAGAGSGAGAGSGAGAGSGAGAGSGAGAGSGAGAGSGAGAGSGAGAGSGAGAGSGAGAGSGAGAGSGAGAGSGAGAGSGAGAGSGAGAGSGAGAGSGAGAGSGAGAGSGAGAGSGAGAGSGAGAGSGAGAGSGAGAGSGAGAGSGAGAGSGAGAGSGAGAGSGAGAGSGAGAGSGAGAGSGAGAGSGAGAGSGAGAGSGAGAGSGAGAGSGAGAGSGAGAGSGAGAGSGAGAGSGAGAGSGAGAGSGAGAGSGAGAGSGAGAGSGAGAGSGAGAGSGAGAGSGAGAGSGAGAGSGAGAGSGAGAGSGAGAGSGAGAGSGAGAGSGAGAGSGAGAGSGAGAGSGAGAGSGAGAGSGAGAGSGAGAGSGAGAGSGAGAGSGAGAGSGAGAGSGAGAGSGAGAGSGAGAGSGAGAGSGAGAGSGAGAGSGAGAGSGAGAGSGAGAGSGAGAGSGAGAGSGAGAGSGAGAGSGAGAGSGAGAGSGAGAGSGAGAGSGAGAGSGAGAGSGAGAGSGAGAGSGAGAGSGAGAGSGAGAGSGAGAGSGAGAGSGAGAGSGAGAGSGAGAGSGAGAGSGAGAGSGAGAGSGAGAGSGAGAGSGAGAGSGAGAGSGAGAGSGAGAGSGAGAGSGAGAGSGAGAGSGAGAGSGAGAGSGAGAGSGAGAGSGAGAGSGAGAGSGAGAGSGAGAGSGAGAGSGAGAGSGAGAGSGAGAGSGAGAGSGAGAGSGAGAGSGAGAGSGAGAGSGAGAGSGAGAGSGAGAGSGAGAGSGAGAGSGAGAGSGAGAGSGAGAGSGAGAGSGAGAGSGAGAGSGAGAGSGAGAGSGAGAGSGVGVPGVGVPGVGVPGVGVPGVGVPGVGVPGVGVPGVGVPGVGVPGVGVPGVGVPGVGVPGVGVPGVGVPGVGVPGVGVPGVGVPGVGVPGVGVPGVGVPGVGVPGVGVPGVGVPGVGVPGVGVPGVGVPGVGVPGVGVPGVGVPGVGVPGVGVPGVGVPGVGVPGVGVPGVGVPGVGVPGVGVPGVGVPGVGVPGVGVPGVGVPGVGVPGVGVPGVGVPGVGVPGVGVPGVGVPGVGVPGVGVPGVGVPGVGVPGVGVPGVGVPGVGVPGVGVPGVGVPGVGVPGVGVPGVGVPGVGVPGVGVPGVGVPGVGVPGVGVPGVGVPGVGVPGVGVPGVGVPGVGVPGVGVPGVGVPGVGVPGVGVPGVGVPGVGVPGVGVPGVGVPGVGVPGVGVPGVGVPGVGVPGVGVPGVGVPGVGVPGVGVPGVGVPGVGVPGVGVPGVGVPGVGVPGVGVPGVGVPGVGVPGVGVPGVGVPGVGVPGVGVPGVGVPGVGVPGVGVPGXGVPGVGVPGVGVPGVGVPGVGVPGVGVPGVGVPGVGVPGVGVPGVGVPGVGVPGVGVPGVGVPGVGVPGVGVPGVGVPGVGVPGVGVPGVGVPGVGVPGVGVPGVGVPGVGVPGVGVPGVGVPGVGVPGVGVPGVGVPGVGVPGVGVPGVGVPGVGVPGVGVPGVGVPGVGVPGVGVPGVGVPGVGVPGVGVPGVGVPGVGVPGVGVPGVGVPGVGVPGVGVPGVGVPGVGVPGVGVPGVGVPGVGVPGVGVPGVGVPGVGVPGVGVPGVGVPGVGVPGVGVPGVGVPGVGVPGVGVPGVGVPGVGVPGVGVPGVGVPGVGVPGVGVPGVGVPGVGVPGVGVPGVGVPGVGVPGVGVPGVGVPGVGVPGVGVPGVGVPGVGVPGVGVPGVGVPGVGVPGVGVPGVGVPGVGVPGVGVPGVGVPGVGVPGVGVPGVGVPGVGVPGVGVPGVGVPGVGVPGVGVPGVGVPGVGVPGVGVPGVGVPGVGVPGVGVPGVGVPGVGVPGAGAGSGAGAGSGAGAGSGAGAGSGAGAGSGAGAGSGAGAGSGAGAGSGAGAGSGAGAGSGAGAGSGAGAGSGAGAGSGAGAGSGAGAGSGAGAGSGAGAGSGAGAGSGAGAGSGAGAGSGAGAGSGAGAGSGAGAGSGAGAGSGAGAGSGAGAGSGAGAGSGAGAGSGAGAGSGAGAGSGAGAGSGAGAGSGAGAGSGAGAGSGAGAGSGAGAGSGAGAGSGAGAGSGAGAGSGAGAGSGAGAGSGAGAGSGAGAGSGAGAGSGAGAGSGAGAGSGAGAGSGAGAGSGAGAGSGAGAGSGAGAGSGAGAGSGAGAGSGAGAGSGAGAGSGAGAGSGAGAGSGAGAGSGAGAGSGAGAGSGAGAGSGAGAGSGAGAGSGAGAGSGAGAGSGAGAGSGAGAGSGAGAGSGAGAGSGAGAGSGAGAGSGAGAGSGAGAGSGAGAGSGAGAGSGAGAGSGAGAGSGAGAGSGAGAGSGAGAGSGAGAGSGAGAGSGAGAGSGAGAGSGAGAGSGAGAGSGAGAGSGAGAGSGAGAGSGAGAGSGAGAGSGAGAGSGAGAGSGAGAGSGAGAGSGAGAGSGAGAGSGAGAGSGAGAGSGAGAGSGAGAGSGAGAGSGAGAGSGAGAGSGAGAGSGAGAGSGAGAGSGAGAGSGAGAGSGAGAGSGAGAGSGAGAGSGAGAGSGAGAGSGAGAGSGAGAGSGAGAGSGAGAGSGAGAGSGAGAGSGAGAGSGAGAGSGAGAGSGAGAGSGAGAGSGAGAGSGAGAGSGAGAGSGAGAGSGAGAGSGAGAGSGAGAGSGAGAGSGAGAGSGAGAGSGAGAGSGAGAGSGAGAGSGAGAGSGAGAGSGAGAGSGAGAGSGAGAGSGAGAGSGAGAGSGAGAGSGAGAGSGAGAGSGAGAGSGAGAGSGAGAGSGAGAGSGAGAGSGAGAGSGAGAGSGAGAGSGAGAGSGAGAGSGAGAGSGAGAGSGAGAGSGAGAGSGAGAGSGAGAGSGAGAGSGAGAGSGAGAGSGAGAGSGAGAGSGAGAGSGAGAGSGAGAGSGAGAGSGAGAGSGAGAGSGAGAGSGAGAGSGAGAGSGAGAGSGAGAGSGAGAGSGAGAGSGAGAGSGAGAGSGAGAGSGAGAGSGAGAGSGAGAGSGAGAGSGAGAGSGAGAGSGAGAGSGAGAGSGAGAGSGAGAGSGAGAGSGAGAGSGAGAGSGAGAGSGAGAGSGAGAGSGVGVPGVGVPGVGVPGVGVPGVGVPGVGVPGVGVPGVGVPGVGVPGVGVPGVGVPGVGVPGVGVPGVGVPGVGVPGVGVPGVGVPGVGVPGVGVPGVGVPGVGVPGVGVPGVGVPGVGVPGVGVPGVGVPGVGVPGVGVPGVGVPGVGVPGVGVPGVGVPGVGVPGVGVPGVGVPGVGVPGVGVPGVGVPGVGVPGVGVPGVGVPGVGVPGVGVPGVGVPGVGVPGVGVPGVGVPGVGVPGVGVPGVGVPGVGVPGVGVPGVGVPGVGVPGVGVPGVGVPGVGVPGVGVPGVGVPGVGVPGVGVPGVGVPGVGVPGVGVPGVGVPGVGVPGVGVPGVGVPGVGVPGVGVPGVGVPGVGVPGVGVPGVGVPGVGVPGVGVPGVGVPGVGVPGVGVPGVGVPGVGVPGVGVPGVGVPGVGVPGVGVPGVGVPGVGVPGVGVPGVGVPGVGVPGVGVPGVGVPGVGVPGVGVPGVGVPGVGVPGVGVPGVGVPGVGVPGVGVPGXGVPGVGVPGVGVPGVGVPGVGVPGVGVPGVGVPGVGVPGVGVPGVGVPGVGVPGVGVPGVGVPGVGVPGVGVPGVGVPGVGVPGVGVPGVGVPGVGVPGVGVPGVGVPGVGVPGVGVPGVGVPGVGVPGVGVPGVGVPGVGVPGVGVPGVGVPGVGVPGVGVPGVGVPGVGVPGVGVPGVGVPGVGVPGVGVPGVGVPGVGVPGVGVPGVGVPGVGVPGVGVPGVGVPGVGVPGVGVPGVGVPGVGVPGVGVPGVGVPGVGVPGVGVPGVGVPGVGVPGVGVPGVGVPGVGVPGVGVPGVGVPGVGVPGVGVPGVGVPGVGVPGVGVPGVGVPGVGVPGVGVPGVGVPGVGVPGVGVPGVGVPGVGVPGVGVPGVGVPGVGVPGVGVPGVGVPGVGVPGVGVPGVGVPGVGVPGVGVPGVGVPGVGVPGVGVPGVGVPGVGVPGVGVPGVGVPGVGVPGVGVPGVGVPGVGVPGVGVPGVGVPGVGVPGVGVPGVGVPGVGVPGAGAGSGAGAGSGAGAGSGAGAGSGAGAGSGAGAGSGAGAGSGAGAGSGAGAGSGAGAGSGAGAGSGAGAGSGAGAGSGAGAGSGAGAGSGAGAGSGAGAGSGAGAGSGAGAGSGAGAGSGAGAGSGAGAGSGAGAGSGAGAGSGAGAGSGAGAGSGAGAGSGAGAGSGAGAGSGAGAGSGAGAGSGAGAGSGAGAGSGAGAGSGAGAGSGAGAGSGAGAGSGAGAGSGAGAGSGAGAGSGAGAGSGAGAGSGAGAGSGAGAGSGAGAGSGAGAGSGAGAGSGAGAGSGAGAGSGAGAGSGAGAGSGAGAGSGAGAGSGAGAGSGAGAGSGAGAGSGAGAGSGAGAGSGAGAGSGAGAGSGAGAGSGAGAGSGAGAGSGAGAGSGAGAGSGAGAGSGAGAGSGAGAGSGAGAGSGAGAGSGAGAGSGAGAGSGAGAGSGAGAGSGAGAGSGAGAGSGAGAGSGAGAGSGAGAGSGAGAGSGAGAGSGAGAGSGAGAGSGAGAGSGAGAGSGAGAGSGAGAGSGAGAGSGAGAGSGAGAGSGAGAGSGAGAGSGAGAGSGAGAGSGAGAGSGAGAGSGAGAGSGAGAGSGAGAGSGAGAGSGAGAGSGAGAGSGAGAGSGAGAGSGAGAGSGAGAGSGAGAGSGAGAGSGAGAGSGAGAGSGAGAGSGAGAGSGAGAGSGAGAGSGAGAGSGAGAGSGAGAGSGAGAGSGAGAGSGAGAGSGAGAGSGAGAGSGAGAGSGAGAGSGAGAGSGAGAGSGAGAGSGAGAGSGAGAGSGAGAGSGAGAGSGAGAGSGAGAGSGAGAGSGAGAGSGAGAGSGAGAGSGAGAGSGAGAGSGAGAGSGAGAGSGAGAGSGAGAGSGAGAGSGAGAGSGAGAGSGAGAGSGAGAGSGAGAGSGAGAGSGAGAGSGAGAGSGAGAGSGAGAGSGAGAGSGAGAGSGAGAGSGAGAGSGAGAGSGAGAGSGAGAGSGAGAGSGAGAGSGAGAGSGAGAGSGAGAGSGAGAGSGAGAGSGAGAGSGAGAGSGAGAGSGAGAGSGAGAGSGAGAGSGAGAGSGAGAGSGAGAGSGAGAGSGAGAGSGAGAGSGAGAGSGAGAGSGAGAGSGAGAGSGAGAGSGAGAGSGAGAGSGAGAGSGAGAGSGAGAGSGAGAGSGAGAGSGAGAGSGAGAGSGAGAGSGAGAGSGAGAGSGAGAGSGAGAGSGAGAGSGAGAGSGVGVPGVGVPGVGVPGVGVPGVGVPGVGVPGVGVPGVGVPGVGVPGVGVPGVGVPGVGVPGVGVPGVGVPGVGVPGVGVPGVGVPGVGVPGVGVPGVGVPGVGVPGVGVPGVGVPGVGVPGVGVPGVGVPGVGVPGVGVPGVGVPGVGVPGVGVPGVGVPGVGVPGVGVPGVGVPGVGVPGVGVPGVGVPGVGVPGVGVPGVGVPGVGVPGVGVPGVGVPGVGVPGVGVPGVGVPGVGVPGVGVPGVGVPGVGVPGVGVPGVGVPGVGVPGVGVPGVGVPGVGVPGVGVPGVGVPGVGVPGVGVPGVGVPGVGVPGVGVPGVGVPGVGVPGVGVPGVGVPGVGVPGVGVPGVGVPGVGVPGVGVPGVGVPGVGVPGVGVPGVGVPGVGVPGVGVPGVGVPGVGVPGVGVPGVGVPGVGVPGVGVPGVGVPGVGVPGVGVPGVGVPGVGVPGVGVPGVGVPGVGVPGVGVPGVGVPGVGVPGVGVPGVGVPGVGVPGVGVPGXGVPGVGVPGVGVPGVGVPGVGVPGVGVPGVGVPGVGVPGVGVPGVGVPGVGVPGVGVPGVGVPGVGVPGVGVPGVGVPGVGVPGVGVPGVGVPGVGVPGVGVPGVGVPGVGVPGVGVPGVGVPGVGVPGVGVPGVGVPGVGVPGVGVPGVGVPGVGVPGVGVPGVGVPGVGVPGVGVPGVGVPGVGVPGVGVPGVGVPGVGVPGVGVPGVGVPGVGVPGVGVPGVGVPGVGVPGVGVPGVGVPGVGVPGVGVPGVGVPGVGVPGVGVPGVGVPGVGVPGVGVPGVGVPGVGVPGVGVPGVGVPGVGVPGVGVPGVGVPGVGVPGVGVPGVGVPGVGVPGVGVPGVGVPGVGVPGVGVPGVGVPGVGVPGVGVPGVGVPGVGVPGVGVPGVGVPGVGVPGVGVPGVGVPGVGVPGVGVPGVGVPGVGVPGVGVPGVGVPGVGVPGVGVPGVGVPGVGVPGVGVPGVGVPGVGVPGVGVPGVGVPGVGVPGVGVPGVGVPGVGVPGAGAGSGAGAGSGAGAGSGAGAGSGAGAGSGAGAGSGAGAGSGAGAGSGAGAGSGAGAGSGAGAGSGAGAGSGAGAGSGAGAGSGAGAGSGAGAGSGAGAGSGAGAGSGAGAGSGAGAGSGAGAGSGAGAGSGAGAGSGAGAGSGAGAGSGAGAGSGAGAGSGAGAGSGAGAGSGAGAGSGAGAGSGAGAGSGAGAGSGAGAGSGAGAGSGAGAGSGAGAGSGAGAGSGAGAGSGAGAGSGAGAGSGAGAGSGAGAGSGAGAGSGAGAGSGAGAGSGAGAGSGAGAGSGAGAGSGAGAGSGAGAGSGAGAGSGAGAGSGAGAGSGAGAGSGAGAGSGAGAGSGAGAGSGAGAGSGAGAGSGAGAGSGAGAGSGAGAGSGAGAGSGAGAGSGAGAGSGAGAGSGAGAGSGAGAGSGAGAGSGAGAGSGAGAGSGAGAGSGAGAGSGAGAGSGAGAGSGAGAGSGAGAGSGAGAGSGAGAGSGAGAGSGAGAGSGAGAGSGAGAGSGAGAGSGAGAGSGAGAGSGAGAGSGAGAGSGAGAGSGAGAGSGAGAGSGAGAGSGAGAGSGAGAGSGAGAGSGAGAGSGAGAGSGAGAGSGAGAGSGAGAGSGAGAGSGAGAGSGAGAGSGAGAGSGAGAGSGAGAGSGAGAGSGAGAGSGAGAGSGAGAGSGAGAGSGAGAGSGAGAGSGAGAGSGAGAGSGAGAGSGAGAGSGAGAGSGAGAGSGAGAGSGAGAGSGAGAGSGAGAGSGAGAGSGAGAGSGAGAGSGAGAGSGAGAGSGAGAGSGAGAGSGAGAGSGAGAGSGAGAGSGAGAGSGAGAGSGAGAGSGAGAGSGAGAGSGAGAGSGAGAGSGAGAGSGAGAGSGAGAGSGAGAGSGAGAGSGAGAGSGAGAGSGAGAGSGAGAGSGAGAGSGAGAGSGAGAGSGAGAGSGAGAGSGAGAGSGAGAGSGAGAGSGAGAGSGAGAGSGAGAGSGAGAGSGAGAGSGAGAGSGAGAGSGAGAGSGAGAGSGAGAGSGAGAGSGAGAGSGAGAGSGAGAGSGAGAGSGAGAGSGAGAGSGAGAGSGAGAGSGAGAGSGAGAGSGAGAGSGAGAGSGAGAGSGAGAGSGAGAGSGAGAGSGAGAGSGAGAGSGAGAGSGAGAGSGAGAGSGAGAGSGAGAGSGAGAGSGAGAGSGAGAGSGAGAGSGAGAGSGAGAGSGAGAGSGAGAGSGAGAGSGVGVPGVGVPGVGVPGVGVPGVGVPGVGVPGVGVPGVGVPGVGVPGVGVPGVGVPGVGVPGVGVPGVGVPGVGVPGVGVPGVGVPGVGVPGVGVPGVGVPGVGVPGVGVPGVGVPGVGVPGVGVPGVGVPGVGVPGVGVPGVGVPGVGVPGVGVPGVGVPGVGVPGVGVPGVGVPGVGVPGVGVPGVGVPGVGVPGVGVPGVGVPGVGVPGVGVPGVGVPGVGVPGVGVPGVGVPGVGVPGVGVPGVGVPGVGVPGVGVPGVGVPGVGVPGVGVPGVGVPGVGVPGVGVPGVGVPGVGVPGVGVPGVGVPGVGVPGVGVPGVGVPGVGVPGVGVPGVGVPGVGVPGVGVPGVGVPGVGVPGVGVPGVGVPGVGVPGVGVPGVGVPGVGVPGVGVPGVGVPGVGVPGVGVPGVGVPGVGVPGVGVPGVGVPGVGVPGVGVPGVGVPGVGVPGVGVPGVGVPGVGVPGVGVPGVGVPGVGVPGVGVPGVGVPGVGVPGVGVPGXGVPGVGVPGVGVPGVGVPGVGVPGVGVPGVGVPGVGVPGVGVPGVGVPGVGVPGVGVPGVGVPGVGVPGVGVPGVGVPGVGVPGVGVPGVGVPGVGVPGVGVPGVGVPGVGVPGVGVPGVGVPGVGVPGVGVPGVGVPGVGVPGVGVPGVGVPGVGVPGVGVPGVGVPGVGVPGVGVPGVGVPGVGVPGVGVPGVGVPGVGVPGVGVPGVGVPGVGVPGVGVPGVGVPGVGVPGVGVPGVGVPGVGVPGVGVPGVGVPGVGVPGVGVPGVGVPGVGVPGVGVPGVGVPGVGVPGVGVPGVGVPGVGVPGVGVPGVGVPGVGVPGVGVPGVGVPGVGVPGVGVPGVGVPGVGVPGVGVPGVGVPGVGVPGVGVPGVGVPGVGVPGVGVPGVGVPGVGVPGVGVPGVGVPGVGVPGVGVPGVGVPGVGVPGVGVPGVGVPGVGVPGVGVPGVGVPGVGVPGVGVPGVGVPGVGVPGVGVPGVGVPGVGVPGVGVPGVGVPGVGVPGAGAGSGAGAGSGAGAGSGAGAGSGAGAGSGAGAGSGAGAGSGAGAGSGAGAGSGAGAGSGAGAGSGAGAGSGAGAGSGAGAGSGAGAGSGAGAGSGAGAGSGAGAGSGAGAGSGAGAGSGAGAGSGAGAGSGAGAGSGAGAGSGAGAGSGAGAGSGAGAGSGAGAGSGAGAGSGAGAGSGAGAGSGAGAGSGAGAGSGAGAGSGAGAGSGAGAGSGAGAGSGAGAGSGAGAGSGAGAGSGAGAGSGAGAGSGAGAGSGAGAGSGAGAGSGAGAGSGAGAGSGAGAGSGAGAGSGAGAGSGAGAGSGAGAGSGAGAGSGAGAGSGAGAGSGAGAGSGAGAGSGAGAGSGAGAGSGAGAGSGAGAGSGAGAGSGAGAGSGAGAGSGAGAGSGAGAGSGAGAGSGAGAGSGAGAGSGAGAGSGAGAGSGAGAGSGAGAGSGAGAGSGAGAGSGAGAGSGAGAGSGAGAGSGAGAGSGAGAGSGAGAGSGAGAGSGAGAGSGAGAGSGAGAGSGAGAGSGAGAGSGAGAGSGAGAGSGAGAGSGAGAGSGAGAGSGAGAGSGAGAGSGAGAGSGAGAGSGAGAGSGAGAGSGAGAGSGAGAGSGAGAGSGAGAGSGAGAGSGAGAGSGAGAGSGAGAGSGAGAGSGAGAGSGAGAGSGAGAGSGAGAGSGAGAGSGAGAGSGAGAGSGAGAGSGAGAGSGAGAGSGAGAGSGAGAGSGAGAGSGAGAGSGAGAGSGAGAGSGAGAGSGAGAGSGAGAGSGAGAGSGAGAGSGAGAGSGAGAGSGAGAGSGAGAGSGAGAGSGAGAGSGAGAGSGAGAGSGAGAGSGAGAGSGAGAGSGAGAGSGAGAGSGAGAGSGAGAGSGAGAGSGAGAGSGAGAGSGAGAGSGAGAGSGAGAGSGAGAGSGAGAGSGAGAGSGAGAGSGAGAGSGAGAGSGAGAGSGAGAGSGAGAGSGAGAGSGAGAGSGAGAGSGAGAGSGAGAGSGAGAGSGAGAGSGAGAGSGAGAGSGAGAGSGAGAGSGAGAGSGAGAGSGAGAGSGAGAGSGAGAGSGAGAGSGAGAGSGAGAGSGAGAGSGAGAGSGAGAGSGAGAGSGAGAGSGAGAGSGAGAGSGAGAGSGAGAGSGAGAGSGAGAGSGAGAGSGAGAGSGAGAGSGAGAGSGAGAGSGAGAGSGAGAGSGAGAGSGAGAGSGAGAGSGAGAGSGAGAGSGAGAGSGVGVPGVGVPGVGVPGVGVPGVGVPGVGVPGVGVPGVGVPGVGVPGVGVPGVGVPGVGVPGVGVPGVGVPGVGVPGVGVPGVGVPGVGVPGVGVPGVGVPGVGVPGVGVPGVGVPGVGVPGVGVPGVGVPGVGVPGVGVPGVGVPGVGVPGVGVPGVGVPGVGVPGVGVPGVGVPGVGVPGVGVPGVGVPGVGVPGVGVPGVGVPGVGVPGVGVPGVGVPGVGVPGVGVPGVGVPGVGVPGVGVPGVGVPGVGVPGVGVPGVGVPGVGVPGVGVPGVGVPGVGVPGVGVPGVGVPGVGVPGVGVPGVGVPGVGVPGVGVPGVGVPGVGVPGVGVPGVGVPGVGVPGVGVPGVGVPGVGVPGVGVPGVGVPGVGVPGVGVPGVGVPGVGVPGVGVPGVGVPGVGVPGVGVPGVGVPGVGVPGVGVPGVGVPGVGVPGVGVPGVGVPGVGVPGVGVPGVGVPGVGVPGVGVPGVGVPGVGVPGVGVPGVGVPGVGVPGVGVPGXGVPGVGVPGVGVPGVGVPGVGVPGVGVPGVGVPGVGVPGVGVPGVGVPGVGVPGVGVPGVGVPGVGVPGVGVPGVGVPGVGVPGVGVPGVGVPGVGVPGVGVPGVGVPGVGVPGVGVPGVGVPGVGVPGVGVPGVGVPGVGVPGVGVPGVGVPGVGVPGVGVPGVGVPGVGVPGVGVPGVGVPGVGVPGVGVPGVGVPGVGVPGVGVPGVGVPGVGVPGVGVPGVGVPGVGVPGVGVPGVGVPGVGVPGVGVPGVGVPGVGVPGVGVPGVGVPGVGVPGVGVPGVGVPGVGVPGVGVPGVGVPGVGVPGVGVPGVGVPGVGVPGVGVPGVGVPGVGVPGVGVPGVGVPGVGVPGVGVPGVGVPGVGVPGVGVPGVGVPGVGVPGVGVPGVGVPGVGVPGVGVPGVGVPGVGVPGVGVPGVGVPGVGVPGVGVPGVGVPGVGVPGVGVPGVGVPGVGVPGVGVPGVGVPGVGVPGVGVPGVGVPGVGVPGVGVPGVGVPGVGVPGAGAGSGAGAGSGAGAGSGAGAGSGAGAGSGAGAGSGAGAGSGAGAGSGAGAGSGAGAGSGAGAGSGAGAGSGAGAGSGAGAGSGAGAGSGAGAGSGAGAGSGAGAGSGAGAGSGAGAGSGAGAGSGAGAGSGAGAGSGAGAGSGAGAGSGAGAGSGAGAGSGAGAGSGAGAGSGAGAGSGAGAGSGAGAGSGAGAGSGAGAGSGAGAGSGAGAGSGAGAGSGAGAGSGAGAGSGAGAGSGAGAGSGAGAGSGAGAGSGAGAGSGAGAGSGAGAGSGAGAGSGAGAGSGAGAGSGAGAGSGAGAGSGAGAGSGAGAGSGAGAGSGAGAGSGAGAGSGAGAGSGAGAGSGAGAGSGAGAGSGAGAGSGAGAGSGAGAGSGAGAGSGAGAGSGAGAGSGAGAGSGAGAGSGAGAGSGAGAGSGAGAGSGAGAGSGAGAGSGAGAGSGAGAGSGAGAGSGAGAGSGAGAGSGAGAGSGAGAGSGAGAGSGAGAGSGAGAGSGAGAGSGAGAGSGAGAGSGAGAGSGAGAGSGAGAGSGAGAGSGAGAGSGAGAGSGAGAGSGAGAGSGAGAGSGAGAGSGAGAGSGAGAGSGAGAGSGAGAGSGAGAGSGAGAGSGAGAGSGAGAGSGAGAGSGAGAGSGAGAGSGAGAGSGAGAGSGAGAGSGAGAGSGAGAGSGAGAGSGAGAGSGAGAGSGAGAGSGAGAGSGAGAGSGAGAGSGAGAGSGAGAGSGAGAGSGAGAGSGAGAGSGAGAGSGAGAGSGAGAGSGAGAGSGAGAGSGAGAGSGAGAGSGAGAGSGAGAGSGAGAGSGAGAGSGAGAGSGAGAGSGAGAGSGAGAGSGAGAGSGAGAGSGAGAGSGAGAGSGAGAGSGAGAGSGAGAGSGAGAGSGAGAGSGAGAGSGAGAGSGAGAGSGAGAGSGAGAGSGAGAGSGAGAGSGAGAGSGAGAGSGAGAGSGAGAGSGAGAGSGAGAGSGAGAGSGAGAGSGAGAGSGAGAGSGAGAGSGAGAGSGAGAGSGAGAGSGAGAGSGAGAGSGAGAGSGAGAGSGAGAGSGAGAGSGAGAGSGAGAGSGAGAGSGAGAGSGAGAGSGAGAGSGAGAGSGAGAGSGAGAGSGAGAGSGAGAGSGAGAGSGAGAGSGAGAGSGAGAGSGAGAGSGAGAGSGAGAGSGAGAGSGAGAGSGAGAGSGAGAGSGAGAGSGAGAGSGAGAGSGAGAGSGVGVPGVGVPGVGVPGVGVPGVGVPGVGVPGVGVPGVGVPGVGVPGVGVPGVGVPGVGVPGVGVPGVGVPGVGVPGVGVPGVGVPGVGVPGVGVPGVGVPGVGVPGVGVPGVGVPGVGVPGVGVPGVGVPGVGVPGVGVPGVGVPGVGVPGVGVPGVGVPGVGVPGVGVPGVGVPGVGVPGVGVPGVGVPGVGVPGVGVPGVGVPGVGVPGVGVPGVGVPGVGVPGVGVPGVGVPGVGVPGVGVPGVGVPGVGVPGVGVPGVGVPGVGVPGVGVPGVGVPGVGVPGVGVPGVGVPGVGVPGVGVPGVGVPGVGVPGVGVPGVGVPGVGVPGVGVPGVGVPGVGVPGVGVPGVGVPGVGVPGVGVPGVGVPGVGVPGVGVPGVGVPGVGVPGVGVPGVGVPGVGVPGVGVPGVGVPGVGVPGVGVPGVGVPGVGVPGVGVPGVGVPGVGVPGVGVPGVGVPGVGVPGVGVPGVGVPGVGVPGVGVPGVGVPGVGVPGVGVPGXGVPGVGVPGVGVPGVGVPGVGVPGVGVPGVGVPGVGVPGVGVPGVGVPGVGVPGVGVPGVGVPGVGVPGVGVPGVGVPGVGVPGVGVPGVGVPGVGVPGVGVPGVGVPGVGVPGVGVPGVGVPGVGVPGVGVPGVGVPGVGVPGVGVPGVGVPGVGVPGVGVPGVGVPGVGVPGVGVPGVGVPGVGVPGVGVPGVGVPGVGVPGVGVPGVGVPGVGVPGVGVPGVGVPGVGVPGVGVPGVGVPGVGVPGVGVPGVGVPGVGVPGVGVPGVGVPGVGVPGVGVPGVGVPGVGVPGVGVPGVGVPGVGVPGVGVPGVGVPGVGVPGVGVPGVGVPGVGVPGVGVPGVGVPGVGVPGVGVPGVGVPGVGVPGVGVPGVGVPGVGVPGVGVPGVGVPGVGVPGVGVPGVGVPGVGVPGVGVPGVGVPGVGVPGVGVPGVGVPGVGVPGVGVPGVGVPGVGVPGVGVPGVGVPGVGVPGVGVPGVGVPGVGVPGVGVPGVGVPGVGVPGAGAGSGAGAGSGAGAGSGAGAGSGAGAGSGAGAGSGAGAGSGAGAGSGAGAGSGAGAGSGAGAGSGAGAGSGAGAGSGAGAGSGAGAGSGAGAGSGAGAGSGAGAGSGAGAGSGAGAGSGAGAGSGAGAGSGAGAGSGAGAGSGAGAGSGAGAGSGAGAGSGAGAGSGAGAGSGAGAGSGAGAGSGAGAGSGAGAGSGAGAGSGAGAGSGAGAGSGAGAGSGAGAGSGAGAGSGAGAGSGAGAGSGAGAGSGAGAGSGAGAGSGAGAGSGAGAGSGAGAGSGAGAGSGAGAGSGAGAGSGAGAGSGAGAGSGAGAGSGAGAGSGAGAGSGAGAGSGAGAGSGAGAGSGAGAGSGAGAGSGAGAGSGAGAGSGAGAGSGAGAGSGAGAGSGAGAGSGAGAGSGAGAGSGAGAGSGAGAGSGAGAGSGAGAGSGAGAGSGAGAGSGAGAGSGAGAGSGAGAGSGAGAGSGAGAGSGAGAGSGAGAGSGAGAGSGAGAGSGAGAGSGAGAGSGAGAGSGAGAGSGAGAGSGAGAGSGAGAGSGAGAGSGAGAGSGAGAGSGAGAGSGAGAGSGAGAGSGAGAGSGAGAGSGAGAGSGAGAGSGAGAGSGAGAGSGAGAGSGAGAGSGAGAGSGAGAGSGAGAGSGAGAGSGAGAGSGAGAGSGAGAGSGAGAGSGAGAGSGAGAGSGAGAGSGAGAGSGAGAGSGAGAGSGAGAGSGAGAGSGAGAGSGAGAGSGAGAGSGAGAGSGAGAGSGAGAGSGAGAGSGAGAGSGAGAGSGAGAGSGAGAGSGAGAGSGAGAGSGAGAGSGAGAGSGAGAGSGAGAGSGAGAGSGAGAGSGAGAGSGAGAGSGAGAGSGAGAGSGAGAGSGAGAGSGAGAGSGAGAGSGAGAGSGAGAGSGAGAGSGAGAGSGAGAGSGAGAGSGAGAGSGAGAGSGAGAGSGAGAGSGAGAGSGAGAGSGAGAGSGAGAGSGAGAGSGAGAGSGAGAGSGAGAGSGAGAGSGAGAGSGAGAGSGAGAGSGAGAGSGAGAGSGAGAGSGAGAGSGAGAGSGAGAGSGAGAGSGAGAGSGAGAGSGAGAGSGAGAGSGAGAGSGAGAGSGAGAGSGAGAGSGAGAGSGAGAGSGAGAGSGAGAGSGAGAGSGAGAGSGAGAGSGAGAGSGAGAGSGAGAGSGAGAGSGAGAGSGAGAGSGAGAGSGAGAGSGAGAGSGAGAGSGVGVPGVGVPGVGVPGVGVPGVGVPGVGVPGVGVPGVGVPGVGVPGVGVPGVGVPGVGVPGVGVPGVGVPGVGVPGVGVPGVGVPGVGVPGVGVPGVGVPGVGVPGVGVPGVGVPGVGVPGVGVPGVGVPGVGVPGVGVPGVGVPGVGVPGVGVPGVGVPGVGVPGVGVPGVGVPGVGVPGVGVPGVGVPGVGVPGVGVPGVGVPGVGVPGVGVPGVGVPGVGVPGVGVPGVGVPGVGVPGVGVPGVGVPGVGVPGVGVPGVGVPGVGVPGVGVPGVGVPGVGVPGVGVPGVGVPGVGVPGVGVPGVGVPGVGVPGVGVPGVGVPGVGVPGVGVPGVGVPGVGVPGVGVPGVGVPGVGVPGVGVPGVGVPGVGVPGVGVPGVGVPGVGVPGVGVPGVGVPGVGVPGVGVPGVGVPGVGVPGVGVPGVGVPGVGVPGVGVPGVGVPGVGVPGVGVPGVGVPGVGVPGVGVPGVGVPGVGVPGVGVPGVGVPGVGVPGVGVPGXGVPGVGVPGVGVPGVGVPGVGVPGVGVPGVGVPGVGVPGVGVPGVGVPGVGVPGVGVPGVGVPGVGVPGVGVPGVGVPGVGVPGVGVPGVGVPGVGVPGVGVPGVGVPGVGVPGVGVPGVGVPGVGVPGVGVPGVGVPGVGVPGVGVPGVGVPGVGVPGVGVPGVGVPGVGVPGVGVPGVGVPGVGVPGVGVPGVGVPGVGVPGVGVPGVGVPGVGVPGVGVPGVGVPGVGVPGVGVPGVGVPGVGVPGVGVPGVGVPGVGVPGVGVPGVGVPGVGVPGVGVPGVGVPGVGVPGVGVPGVGVPGVGVPGVGVPGVGVPGVGVPGVGVPGVGVPGVGVPGVGVPGVGVPGVGVPGVGVPGVGVPGVGVPGVGVPGVGVPGVGVPGVGVPGVGVPGVGVPGVGVPGVGVPGVGVPGVGVPGVGVPGVGVPGVGVPGVGVPGVGVPGVGVPGVGVPGVGVPGVGVPGVGVPGVGVPGVGVPGVGVPGVGVPGVGVPGVGVPGVGVPGAGAGSGAGAGSGAGAGSGAGAGSGAGAGSGAGAGSGAGAGSGAGAGSGAGAGSGAGAGSGAGAGSGAGAGSGAGAGSGAGAGSGAGAGSGAGAGSGAGAGSGAGAGSGAGAGSGAGAGSGAGAGSGAGAGSGAGAGSGAGAGSGAGAGSGAGAGSGAGAGSGAGAGSGAGAGSGAGAGSGAGAGSGAGAGSGAGAGSGAGAGSGAGAGSGAGAGSGAGAGSGAGAGSGAGAGSGAGAGSGAGAGSGAGAGSGAGAGSGAGAGSGAGAGSGAGAGSGAGAGSGAGAGSGAGAGSGAGAGSGAGAGSGAGAGSGAGAGSGAGAGSGAGAGSGAGAGSGAGAGSGAGAGSGAGAGSGAGAGSGAGAGSGAGAGSGAGAGSGAGAGSGAGAGSGAGAGSGAGAGSGAGAGSGAGAGSGAGAGSGAGAGSGAGAGSGAGAGSGAGAGSGAGAGSGAGAGSGAGAGSGAGAGSGAGAGSGAGAGSGAGAGSGAGAGSGAGAGSGAGAGSGAGAGSGAGAGSGAGAGSGAGAGSGAGAGSGAGAGSGAGAGSGAGAGSGAGAGSGAGAGSGAGAGSGAGAGSGAGAGSGAGAGSGAGAGSGAGAGSGAGAGSGAGAGSGAGAGSGAGAGSGAGAGSGAGAGSGAGAGSGAGAGSGAGAGSGAGAGSGAGAGSGAGAGSGAGAGSGAGAGSGAGAGSGAGAGSGAGAGSGAGAGSGAGAGSGAGAGSGAGAGSGAGAGSGAGAGSGAGAGSGAGAGSGAGAGSGAGAGSGAGAGSGAGAGSGAGAGSGAGAGSGAGAGSGAGAGSGAGAGSGAGAGSGAGAGSGAGAGSGAGAGSGAGAGSGAGAGSGAGAGSGAGAGSGAGAGSGAGAGSGAGAGSGAGAGSGAGAGSGAGAGSGAGAGSGAGAGSGAGAGSGAGAGSGAGAGSGAGAGSGAGAGSGAGAGSGAGAGSGAGAGSGAGAGSGAGAGSGAGAGSGAGAGSGAGAGSGAGAGSGAGAGSGAGAGSGAGAGSGAGAGSGAGAGSGAGAGSGAGAGSGAGAGSGAGAGSGAGAGSGAGAGSGAGAGSGAGAGSGAGAGSGAGAGSGAGAGSGAGAGSGAGAGSGAGAGSGAGAGSGAGAGSGAGAGSGAGAGSGAGAGSGAGAGSGAGAGSGAGAGSGAGAGSGAGAGSGAGAGSGAGAGSGAGAGSGAGAGSGAGAGSGAGAGSGAGAGSGAGAGSGVGVPGVGVPGVGVPGVGVPGVGVPGVGVPGVGVPGVGVPGVGVPGVGVPGVGVPGVGVPGVGVPGVGVPGVGVPGVGVPGVGVPGVGVPGVGVPGVGVPGVGVPGVGVPGVGVPGVGVPGVGVPGVGVPGVGVPGVGVPGVGVPGVGVPGVGVPGVGVPGVGVPGVGVPGVGVPGVGVPGVGVPGVGVPGVGVPGVGVPGVGVPGVGVPGVGVPGVGVPGVGVPGVGVPGVGVPGVGVPGVGVPGVGVPGVGVPGVGVPGVGVPGVGVPGVGVPGVGVPGVGVPGVGVPGVGVPGVGVPGVGVPGVGVPGVGVPGVGVPGVGVPGVGVPGVGVPGVGVPGVGVPGVGVPGVGVPGVGVPGVGVPGVGVPGVGVPGVGVPGVGVPGVGVPGVGVPGVGVPGVGVPGVGVPGVGVPGVGVPGVGVPGVGVPGVGVPGVGVPGVGVPGVGVPGVGVPGVGVPGVGVPGVGVPGVGVPGVGVPGVGVPGVGVPGVGVPGVGVPGXGVPGVGVPGVGVPGVGVPGVGVPGVGVPGVGVPGVGVPGVGVPGVGVPGVGVPGVGVPGVGVPGVGVPGVGVPGVGVPGVGVPGVGVPGVGVPGVGVPGVGVPGVGVPGVGVPGVGVPGVGVPGVGVPGVGVPGVGVPGVGVPGVGVPGVGVPGVGVPGVGVPGVGVPGVGVPGVGVPGVGVPGVGVPGVGVPGVGVPGVGVPGVGVPGVGVPGVGVPGVGVPGVGVPGVGVPGVGVPGVGVPGVGVPGVGVPGVGVPGVGVPGVGVPGVGVPGVGVPGVGVPGVGVPGVGVPGVGVPGVGVPGVGVPGVGVPGVGVPGVGVPGVGVPGVGVPGVGVPGVGVPGVGVPGVGVPGVGVPGVGVPGVGVPGVGVPGVGVPGVGVPGVGVPGVGVPGVGVPGVGVPGVGVPGVGVPGVGVPGVGVPGVGVPGVGVPGVGVPGVGVPGVGVPGVGVPGVGVPGVGVPGVGVPGVGVPGVGVPGVGVPGVGVPGVGVPGVGVPGVGVPGAGAGSGAGAGSGAGAGSGAGAGSGAGAGSGAGAGSGAGAGSGAGAGSGAGAGSGAGAGSGAGAGSGAGAGSGAGAGSGAGAGSGAGAGSGAGAGSGAGAGSGAGAGSGAGAGSGAGAGSGAGAGSGAGAGSGAGAGSGAGAGSGAGAGSGAGAGSGAGAGSGAGAGSGAGAGSGAGAGSGAGAGSGAGAGSGAGAGSGAGAGSGAGAGSGAGAGSGAGAGSGAGAGSGAGAGSGAGAGSGAGAGSGAGAGSGAGAGSGAGAGSGAGAGSGAGAGSGAGAGSGAGAGSGAGAGSGAGAGSGAGAGSGAGAGSGAGAGSGAGAGSGAGAGSGAGAGSGAGAGSGAGAGSGAGAGSGAGAGSGAGAGSGAGAGSGAGAGSGAGAGSGAGAGSGAGAGSGAGAGSGAGAGSGAGAGSGAGAGSGAGAGSGAGAGSGAGAGSGAGAGSGAGAGSGAGAGSGAGAGSGAGAGSGAGAGSGAGAGSGAGAGSGAGAGSGAGAGSGAGAGSGAGAGSGAGAGSGAGAGSGAGAGSGAGAGSGAGAGSGAGAGSGAGAGSGAGAGSGAGAGSGAGAGSGAGAGSGAGAGSGAGAGSGAGAGSGAGAGSGAGAGSGAGAGSGAGAGSGAGAGSGAGAGSGAGAGSGAGAGSGAGAGSGAGAGSGAGAGSGAGAGSGAGAGSGAGAGSGAGAGSGAGAGSGAGAGSGAGAGSGAGAGSGAGAGSGAGAGSGAGAGSGAGAGSGAGAGSGAGAGSGAGAGSGAGAGSGAGAGSGAGAGSGAGAGSGAGAGSGAGAGSGAGAGSGAGAGSGAGAGSGAGAGSGAGAGSGAGAGSGAGAGSGAGAGSGAGAGSGAGAGSGAGAGSGAGAGSGAGAGSGAGAGSGAGAGSGAGAGSGAGAGSGAGAGSGAGAGSGAGAGSGAGAGSGAGAGSGAGAGSGAGAGSGAGAGSGAGAGSGAGAGSGAGAGSGAGAGSGAGAGSGAGAGSGAGAGSGAGAGSGAGAGSGAGAGSGAGAGSGAGAGSGAGAGSGAGAGSGAGAGSGAGAGSGAGAGSGAGAGSGAGAGSGAGAGSGAGAGSGAGAGSGAGAGSGAGAGSGAGAGSGAGAGSGAGAGSGAGAGSGAGAGSGAGAGSGAGAGSGAGAGSGAGAGSGAGAGSGAGAGSGAGAGSGAGAGSGAGAGSGAGAGSGAGAGSGAGAGSGAGAGSGAGAGSGAGAGSGAGAGSGVGVPGVGVPGVGVPGVGVPGVGVPGVGVPGVGVPGVGVPGVGVPGVGVPGVGVPGVGVPGVGVPGVGVPGVGVPGVGVPGVGVPGVGVPGVGVPGVGVPGVGVPGVGVPGVGVPGVGVPGVGVPGVGVPGVGVPGVGVPGVGVPGVGVPGVGVPGVGVPGVGVPGVGVPGVGVPGVGVPGVGVPGVGVPGVGVPGVGVPGVGVPGVGVPGVGVPGVGVPGVGVPGVGVPGVGVPGVGVPGVGVPGVGVPGVGVPGVGVPGVGVPGVGVPGVGVPGVGVPGVGVPGVGVPGVGVPGVGVPGVGVPGVGVPGVGVPGVGVPGVGVPGVGVPGVGVPGVGVPGVGVPGVGVPGVGVPGVGVPGVGVPGVGVPGVGVPGVGVPGVGVPGVGVPGVGVPGVGVPGVGVPGVGVPGVGVPGVGVPGVGVPGVGVPGVGVPGVGVPGVGVPGVGVPGVGVPGVGVPGVGVPGVGVPGVGVPGVGVPGVGVPGVGVPGVGVPGVGVPGXGVPGVGVPGVGVPGVGVPGVGVPGVGVPGVGVPGVGVPGVGVPGVGVPGVGVPGVGVPGVGVPGVGVPGVGVPGVGVPGVGVPGVGVPGVGVPGVGVPGVGVPGVGVPGVGVPGVGVPGVGVPGVGVPGVGVPGVGVPGVGVPGVGVPGVGVPGVGVPGVGVPGVGVPGVGVPGVGVPGVGVPGVGVPGVGVPGVGVPGVGVPGVGVPGVGVPGVGVPGVGVPGVGVPGVGVPGVGVPGVGVPGVGVPGVGVPGVGVPGVGVPGVGVPGVGVPGVGVPGVGVPGVGVPGVGVPGVGVPGVGVPGVGVPGVGVPGVGVPGVGVPGVGVPGVGVPGVGVPGVGVPGVGVPGVGVPGVGVPGVGVPGVGVPGVGVPGVGVPGVGVPGVGVPGVGVPGVGVPGVGVPGVGVPGVGVPGVGVPGVGVPGVGVPGVGVPGVGVPGVGVPGVGVPGVGVPGVGVPGVGVPGVGVPGVGVPGVGVPGVGVPGVGVPGVGVPGVGVPGVGVPGAGAGSGAGAGSGAGAGSGAGAGSGAGAGSGAGAGSGAGAGSGAGAGSGAGAGSGAGAGSGAGAGSGAGAGSGAGAGSGAGAGSGAGAGSGAGAGSGAGAGSGAGAGSGAGAGSGAGAGSGAGAGSGAGAGSGAGAGSGAGAGSGAGAGSGAGAGSGAGAGSGAGAGSGAGAGSGAGAGSGAGAGSGAGAGSGAGAGSGAGAGSGAGAGSGAGAGSGAGAGSGAGAGSGAGAGSGAGAGSGAGAGSGAGAGSGAGAGSGAGAGSGAGAGSGAGAGSGAGAGSGAGAGSGAGAGSGAGAGSGAGAGSGAGAGSGAGAGSGAGAGSGAGAGSGAGAGSGAGAGSGAGAGSGAGAGSGAGAGSGAGAGSGAGAGSGAGAGSGAGAGSGAGAGSGAGAGSGAGAGSGAGAGSGAGAGSGAGAGSGAGAGSGAGAGSGAGAGSGAGAGSGAGAGSGAGAGSGAGAGSGAGAGSGAGAGSGAGAGSGAGAGSGAGAGSGAGAGSGAGAGSGAGAGSGAGAGSGAGAGSGAGAGSGAGAGSGAGAGSGAGAGSGAGAGSGAGAGSGAGAGSGAGAGSGAGAGSGAGAGSGAGAGSGAGAGSGAGAGSGAGAGSGAGAGSGAGAGSGAGAGSGAGAGSGAGAGSGAGAGSGAGAGSGAGAGSGAGAGSGAGAGSGAGAGSGAGAGSGAGAGSGAGAGSGAGAGSGAGAGSGAGAGSGAGAGSGAGAGSGAGAGSGAGAGSGAGAGSGAGAGSGAGAGSGAGAGSGAGAGSGAGAGSGAGAGSGAGAGSGAGAGSGAGAGSGAGAGSGAGAGSGAGAGSGAGAGSGAGAGSGAGAGSGAGAGSGAGAGSGAGAGSGAGAGSGAGAGSGAGAGSGAGAGSGAGAGSGAGAGSGAGAGSGAGAGSGAGAGSGAGAGSGAGAGSGAGAGSGAGAGSGAGAGSGAGAGSGAGAGSGAGAGSGAGAGSGAGAGSGAGAGSGAGAGSGAGAGSGAGAGSGAGAGSGAGAGSGAGAGSGAGAGSGAGAGSGAGAGSGAGAGSGAGAGSGAGAGSGAGAGSGAGAGSGAGAGSGAGAGSGAGAGSGAGAGSGAGAGSGAGAGSGAGAGSGAGAGSGAGAGSGAGAGSGAGAGSGAGAGSGAGAGSGAGAGSGAGAGSGAGAGSGAGAGSGAGAGSGAGAGSGAGAGSGAGAGSGAGAGSGAGAGSGAGAGSGAGAGSGAGAGSGVGVPGVGVPGVGVPGVGVPGVGVPGVGVPGVGVPGVGVPGVGVPGVGVPGVGVPGVGVPGVGVPGVGVPGVGVPGVGVPGVGVPGVGVPGVGVPGVGVPGVGVPGVGVPGVGVPGVGVPGVGVPGVGVPGVGVPGVGVPGVGVPGVGVPGVGVPGVGVPGVGVPGVGVPGVGVPGVGVPGVGVPGVGVPGVGVPGVGVPGVGVPGVGVPGVGVPGVGVPGVGVPGVGVPGVGVPGVGVPGVGVPGVGVPGVGVPGVGVPGVGVPGVGVPGVGVPGVGVPGVGVPGVGVPGVGVPGVGVPGVGVPGVGVPGVGVPGVGVPGVGVPGVGVPGVGVPGVGVPGVGVPGVGVPGVGVPGVGVPGVGVPGVGVPGVGVPGVGVPGVGVPGVGVPGVGVPGVGVPGVGVPGVGVPGVGVPGVGVPGVGVPGVGVPGVGVPGVGVPGVGVPGVGVPGVGVPGVGVPGVGVPGVGVPGVGVPGVGVPGVGVPGVGVPGVGVPGVGVPGXGVPGVGVPGVGVPGVGVPGVGVPGVGVPGVGVPGVGVPGVGVPGVGVPGVGVPGVGVPGVGVPGVGVPGVGVPGVGVPGVGVPGVGVPGVGVPGVGVPGVGVPGVGVPGVGVPGVGVPGVGVPGVGVPGVGVPGVGVPGVGVPGVGVPGVGVPGVGVPGVGVPGVGVPGVGVPGVGVPGVGVPGVGVPGVGVPGVGVPGVGVPGVGVPGVGVPGVGVPGVGVPGVGVPGVGVPGVGVPGVGVPGVGVPGVGVPGVGVPGVGVPGVGVPGVGVPGVGVPGVGVPGVGVPGVGVPGVGVPGVGVPGVGVPGVGVPGVGVPGVGVPGVGVPGVGVPGVGVPGVGVPGVGVPGVGVPGVGVPGVGVPGVGVPGVGVPGVGVPGVGVPGVGVPGVGVPGVGVPGVGVPGVGVPGVGVPGVGVPGVGVPGVGVPGVGVPGVGVPGVGVPGVGVPGVGVPGVGVPGVGVPGVGVPGVGVPGVGVPGVGVPGVGVPGVGVPGVGVPGVGVPGAGAGSGAGAGSGAGAGSGAGAGSGAGAGSGAGAGSGAGAGSGAGAGSGAGAGSGAGAGSGAGAGSGAGAGSGAGAGSGAGAGSGAGAGSGAGAGSGAGAGSGAGAGSGAGAGSGAGAGSGAGAGSGAGAGSGAGAGSGAGAGSGAGAGSGAGAGSGAGAGSGAGAGSGAGAGSGAGAGSGAGAGSGAGAGSGAGAGSGAGAGSGAGAGSGAGAGSGAGAGSGAGAGSGAGAGSGAGAGSGAGAGSGAGAGSGAGAGSGAGAGSGAGAGSGAGAGSGAGAGSGAGAGSGAGAGSGAGAGSGAGAGSGAGAGSGAGAGSGAGAGSGAGAGSGAGAGSGAGAGSGAGAGSGAGAGSGAGAGSGAGAGSGAGAGSGAGAGSGAGAGSGAGAGSGAGAGSGAGAGSGAGAGSGAGAGSGAGAGSGAGAGSGAGAGSGAGAGSGAGAGSGAGAGSGAGAGSGAGAGSGAGAGSGAGAGSGAGAGSGAGAGSGAGAGSGAGAGSGAGAGSGAGAGSGAGAGSGAGAGSGAGAGSGAGAGSGAGAGSGAGAGSGAGAGSGAGAGSGAGAGSGAGAGSGAGAGSGAGAGSGAGAGSGAGAGSGAGAGSGAGAGSGAGAGSGAGAGSGAGAGSGAGAGSGAGAGSGAGAGSGAGAGSGAGAGSGAGAGSGAGAGSGAGAGSGAGAGSGAGAGSGAGAGSGAGAGSGAGAGSGAGAGSGAGAGSGAGAGSGAGAGSGAGAGSGAGAGSGAGAGSGAGAGSGAGAGSGAGAGSGAGAGSGAGAGSGAGAGSGAGAGSGAGAGSGAGAGSGAGAGSGAGAGSGAGAGSGAGAGSGAGAGSGAGAGSGAGAGSGAGAGSGAGAGSGAGAGSGAGAGSGAGAGSGAGAGSGAGAGSGAGAGSGAGAGSGAGAGSGAGAGSGAGAGSGAGAGSGAGAGSGAGAGSGAGAGSGAGAGSGAGAGSGAGAGSGAGAGSGAGAGSGAGAGSGAGAGSGAGAGSGAGAGSGAGAGSGAGAGSGAGAGSGAGAGSGAGAGSGAGAGSGAGAGSGAGAGSGAGAGSGAGAGSGAGAGSGAGAGSGAGAGSGAGAGSGAGAGSGAGAGSGAGAGSGAGAGSGAGAGSGAGAGSGAGAGSGAGAGSGAGAGSGAGAGSGAGAGSGAGAGSGAGAGSGAGAGSGAGAGSGAGAGSGAGAGSGAGAGSGAGAGSGAGAGSGAGAGSGAGAGSGVGVPGVGVPGVGVPGVGVPGVGVPGVGVPGVGVPGVGVPGVGVPGVGVPGVGVPGVGVPGVGVPGVGVPGVGVPGVGVPGVGVPGVGVPGVGVPGVGVPGVGVPGVGVPGVGVPGVGVPGVGVPGVGVPGVGVPGVGVPGVGVPGVGVPGVGVPGVGVPGVGVPGVGVPGVGVPGVGVPGVGVPGVGVPGVGVPGVGVPGVGVPGVGVPGVGVPGVGVPGVGVPGVGVPGVGVPGVGVPGVGVPGVGVPGVGVPGVGVPGVGVPGVGVPGVGVPGVGVPGVGVPGVGVPGVGVPGVGVPGVGVPGVGVPGVGVPGVGVPGVGVPGVGVPGVGVPGVGVPGVGVPGVGVPGVGVPGVGVPGVGVPGVGVPGVGVPGVGVPGVGVPGVGVPGVGVPGVGVPGVGVPGVGVPGVGVPGVGVPGVGVPGVGVPGVGVPGVGVPGVGVPGVGVPGVGVPGVGVPGVGVPGVGVPGVGVPGVGVPGVGVPGVGVPGVGVPGVGVPGXGVPGVGVPGVGVPGVGVPGVGVPGVGVPGVGVPGVGVPGVGVPGVGVPGVGVPGVGVPGVGVPGVGVPGVGVPGVGVPGVGVPGVGVPGVGVPGVGVPGVGVPGVGVPGVGVPGVGVPGVGVPGVGVPGVGVPGVGVPGVGVPGVGVPGVGVPGVGVPGVGVPGVGVPGVGVPGVGVPGVGVPGVGVPGVGVPGVGVPGVGVPGVGVPGVGVPGVGVPGVGVPGVGVPGVGVPGVGVPGVGVPGVGVPGVGVPGVGVPGVGVPGVGVPGVGVPGVGVPGVGVPGVGVPGVGVPGVGVPGVGVPGVGVPGVGVPGVGVPGVGVPGVGVPGVGVPGVGVPGVGVPGVGVPGVGVPGVGVPGVGVPGVGVPGVGVPGVGVPGVGVPGVGVPGVGVPGVGVPGVGVPGVGVPGVGVPGVGVPGVGVPGVGVPGVGVPGVGVPGVGVPGVGVPGVGVPGVGVPGVGVPGVGVPGVGVPGVGVPGVGVPGVGVPGVGVPGVGVPGVGVPGAGAGSGAGAGSGAGAGSGAGAGSGAGAGSGAGAGSGAGAGSGAGAGSGAGAGSGAGAGSGAGAGSGAGAGSGAGAGSGAGAGSGAGAGSGAGAGSGAGAGSGAGAGSGAGAGSGAGAGSGAGAGSGAGAGSGAGAGSGAGAGSGAGAGSGAGAGSGAGAGSGAGAGSGAGAGSGAGAGSGAGAGSGAGAGSGAGAGSGAGAGSGAGAGSGAGAGSGAGAGSGAGAGSGAGAGSGAGAGSGAGAGSGAGAGSGAGAGSGAGAGSGAGAGSGAGAGSGAGAGSGAGAGSGAGAGSGAGAGSGAGAGSGAGAGSGAGAGSGAGAGSGAGAGSGAGAGSGAGAGSGAGAGSGAGAGSGAGAGSGAGAGSGAGAGSGAGAGSGAGAGSGAGAGSGAGAGSGAGAGSGAGAGSGAGAGSGAGAGSGAGAGSGAGAGSGAGAGSGAGAGSGAGAGSGAGAGSGAGAGSGAGAGSGAGAGSGAGAGSGAGAGSGAGAGSGAGAGSGAGAGSGAGAGSGAGAGSGAGAGSGAGAGSGAGAGSGAGAGSGAGAGSGAGAGSGAGAGSGAGAGSGAGAGSGAGAGSGAGAGSGAGAGSGAGAGSGAGAGSGAGAGSGAGAGSGAGAGSGAGAGSGAGAGSGAGAGSGAGAGSGAGAGSGAGAGSGAGAGSGAGAGSGAGAGSGAGAGSGAGAGSGAGAGSGAGAGSGAGAGSGAGAGSGAGAGSGAGAGSGAGAGSGAGAGSGAGAGSGAGAGSGAGAGSGAGAGSGAGAGSGAGAGSGAGAGSGAGAGSGAGAGSGAGAGSGAGAGSGAGAGSGAGAGSGAGAGSGAGAGSGAGAGSGAGAGSGAGAGSGAGAGSGAGAGSGAGAGSGAGAGSGAGAGSGAGAGSGAGAGSGAGAGSGAGAGSGAGAGSGAGAGSGAGAGSGAGAGSGAGAGSGAGAGSGAGAGSGAGAGSGAGAGSGAGAGSGAGAGSGAGAGSGAGAGSGAGAGSGAGAGSGAGAGSGAGAGSGAGAGSGAGAGSGAGAGSGAGAGSGAGAGSGAGAGSGAGAGSGAGAGSGAGAGSGAGAGSGAGAGSGAGAGSGAGAGSGAGAGSGAGAGSGAGAGSGAGAGSGAGAGSGAGAGSGAGAGSGAGAGSGAGAGSGAGAGSGAGAGSGAGAGSGAGAGSGAGAGSGAGAGSGAGAGSGAGAGSGAGAGSGAGAGSGAGAGSGAGAGSGAGAGSGVGVPGVGVPGVGVPGVGVPGVGVPGVGVPGVGVPGVGVPGVGVPGVGVPGVGVPGVGVPGVGVPGVGVPGVGVPGVGVPGVGVPGVGVPGVGVPGVGVPGVGVPGVGVPGVGVPGVGVPGVGVPGVGVPGVGVPGVGVPGVGVPGVGVPGVGVPGVGVPGVGVPGVGVPGVGVPGVGVPGVGVPGVGVPGVGVPGVGVPGVGVPGVGVPGVGVPGVGVPGVGVPGVGVPGVGVPGVGVPGVGVPGVGVPGVGVPGVGVPGVGVPGVGVPGVGVPGVGVPGVGVPGVGVPGVGVPGVGVPGVGVPGVGVPGVGVPGVGVPGVGVPGVGVPGVGVPGVGVPGVGVPGVGVPGVGVPGVGVPGVGVPGVGVPGVGVPGVGVPGVGVPGVGVPGVGVPGVGVPGVGVPGVGVPGVGVPGVGVPGVGVPGVGVPGVGVPGVGVPGVGVPGVGVPGVGVPGVGVPGVGVPGVGVPGVGVPGVGVPGVGVPGVGVPGVGVPGVGVPGXGVPGVGVPGVGVPGVGVPGVGVPGVGVPGVGVPGVGVPGVGVPGVGVPGVGVPGVGVPGVGVPGVGVPGVGVPGVGVPGVGVPGVGVPGVGVPGVGVPGVGVPGVGVPGVGVPGVGVPGVGVPGVGVPGVGVPGVGVPGVGVPGVGVPGVGVPGVGVPGVGVPGVGVPGVGVPGVGVPGVGVPGVGVPGVGVPGVGVPGVGVPGVGVPGVGVPGVGVPGVGVPGVGVPGVGVPGVGVPGVGVPGVGVPGVGVPGVGVPGVGVPGVGVPGVGVPGVGVPGVGVPGVGVPGVGVPGVGVPGVGVPGVGVPGVGVPGVGVPGVGVPGVGVPGVGVPGVGVPGVGVPGVGVPGVGVPGVGVPGVGVPGVGVPGVGVPGVGVPGVGVPGVGVPGVGVPGVGVPGVGVPGVGVPGVGVPGVGVPGVGVPGVGVPGVGVPGVGVPGVGVPGVGVPGVGVPGVGVPGVGVPGVGVPGVGVPGVGVPGVGVPGVGVPGVGVPGVGVPGVGVPGAGAGSGAGAGSGAGAGSGAGAGSGAGAGSGAGAGSGAGAGSGAGAGSGAGAGSGAGAGSGAGAGSGAGAGSGAGAGSGAGAGSGAGAGSGAGAGSGAGAGSGAGAGSGAGAGSGAGAGSGAGAGSGAGAGSGAGAGSGAGAGSGAGAGSGAGAGSGAGAGSGAGAGSGAGAGSGAGAGSGAGAGSGAGAGSGAGAGSGAGAGSGAGAGSGAGAGSGAGAGSGAGAGSGAGAGSGAGAGSGAGAGSGAGAGSGAGAGSGAGAGSGAGAGSGAGAGSGAGAGSGAGAGSGAGAGSGAGAGSGAGAGSGAGAGSGAGAGSGAGAGSGAGAGSGAGAGSGAGAGSGAGAGSGAGAGSGAGAGSGAGAGSGAGAGSGAGAGSGAGAGSGAGAGSGAGAGSGAGAGSGAGAGSGAGAGSGAGAGSGAGAGSGAGAGSGAGAGSGAGAGSGAGAGSGAGAGSGAGAGSGAGAGSGAGAGSGAGAGSGAGAGSGAGAGSGAGAGSGAGAGSGAGAGSGAGAGSGAGAGSGAGAGSGAGAGSGAGAGSGAGAGSGAGAGSGAGAGSGAGAGSGAGAGSGAGAGSGAGAGSGAGAGSGAGAGSGAGAGSGAGAGSGAGAGSGAGAGSGAGAGSGAGAGSGAGAGSGAGAGSGAGAGSGAGAGSGAGAGSGAGAGSGAGAGSGAGAGSGAGAGSGAGAGSGAGAGSGAGAGSGAGAGSGAGAGSGAGAGSGAGAGSGAGAGSGAGAGSGAGAGSGAGAGSGAGAGSGAGAGSGAGAGSGAGAGSGAGAGSGAGAGSGAGAGSGAGAGSGAGAGSGAGAGSGAGAGSGAGAGSGAGAGSGAGAGSGAGAGSGAGAGSGAGAGSGAGAGSGAGAGSGAGAGSGAGAGSGAGAGSGAGAGSGAGAGSGAGAGSGAGAGSGAGAGSGAGAGSGAGAGSGAGAGSGAGAGSGAGAGSGAGAGSGAGAGSGAGAGSGAGAGSGAGAGSGAGAGSGAGAGSGAGAGSGAGAGSGAGAGSGAGAGSGAGAGSGAGAGSGAGAGSGAGAGSGAGAGSGAGAGSGAGAGSGAGAGSGAGAGSGAGAGSGAGAGSGAGAGSGAGAGSGAGAGSGAGAGSGAGAGSGAGAGSGAGAGSGAGAGSGAGAGSGAGAGSGAGAGSGAGAGSGAGAGSGAGAGSGAGAGSGAGAGSGAGAGSGAGAGSGAGAGSGAGAGSGAGAGSGAGAGSGVGVPGVGVPGVGVPGVGVPGVGVPGVGVPGVGVPGVGVPGVGVPGVGVPGVGVPGVGVPGVGVPGVGVPGVGVPGVGVPGVGVPGVGVPGVGVPGVGVPGVGVPGVGVPGVGVPGVGVPGVGVPGVGVPGVGVPGVGVPGVGVPGVGVPGVGVPGVGVPGVGVPGVGVPGVGVPGVGVPGVGVPGVGVPGVGVPGVGVPGVGVPGVGVPGVGVPGVGVPGVGVPGVGVPGVGVPGVGVPGVGVPGVGVPGVGVPGVGVPGVGVPGVGVPGVGVPGVGVPGVGVPGVGVPGVGVPGVGVPGVGVPGVGVPGVGVPGVGVPGVGVPGVGVPGVGVPGVGVPGVGVPGVGVPGVGVPGVGVPGVGVPGVGVPGVGVPGVGVPGVGVPGVGVPGVGVPGVGVPGVGVPGVGVPGVGVPGVGVPGVGVPGVGVPGVGVPGVGVPGVGVPGVGVPGVGVPGVGVPGVGVPGVGVPGVGVPGVGVPGVGVPGVGVPGVGVPGVGVPGXGVPGVGVPGVGVPGVGVPGVGVPGVGVPGVGVPGVGVPGVGVPGVGVPGVGVPGVGVPGVGVPGVGVPGVGVPGVGVPGVGVPGVGVPGVGVPGVGVPGVGVPGVGVPGVGVPGVGVPGVGVPGVGVPGVGVPGVGVPGVGVPGVGVPGVGVPGVGVPGVGVPGVGVPGVGVPGVGVPGVGVPGVGVPGVGVPGVGVPGVGVPGVGVPGVGVPGVGVPGVGVPGVGVPGVGVPGVGVPGVGVPGVGVPGVGVPGVGVPGVGVPGVGVPGVGVPGVGVPGVGVPGVGVPGVGVPGVGVPGVGVPGVGVPGVGVPGVGVPGVGVPGVGVPGVGVPGVGVPGVGVPGVGVPGVGVPGVGVPGVGVPGVGVPGVGVPGVGVPGVGVPGVGVPGVGVPGVGVPGVGVPGVGVPGVGVPGVGVPGVGVPGVGVPGVGVPGVGVPGVGVPGVGVPGVGVPGVGVPGVGVPGVGVPGVGVPGVGVPGVGVPGVGVPGVGVPGVGVPGVGVPGAGAGSGAGAGSGAGAGSGAGAGSGAGAGSGAGAGSGAGAGSGAGAGSGAGAGSGAGAGSGAGAGSGAGAGSGAGAGSGAGAGSGAGAGSGAGAGSGAGAGSGAGAGSGAGAGSGAGAGSGAGAGSGAGAGSGAGAGSGAGAGSGAGAGSGAGAGSGAGAGSGAGAGSGAGAGSGAGAGSGAGAGSGAGAGSGAGAGSGAGAGSGAGAGSGAGAGSGAGAGSGAGAGSGAGAGSGAGAGSGAGAGSGAGAGSGAGAGSGAGAGSGAGAGSGAGAGSGAGAGSGAGAGSGAGAGSGAGAGSGAGAGSGAGAGSGAGAGSGAGAGSGAGAGSGAGAGSGAGAGSGAGAGSGAGAGSGAGAGSGAGAGSGAGAGSGAGAGSGAGAGSGAGAGSGAGAGSGAGAGSGAGAGSGAGAGSGAGAGSGAGAGSGAGAGSGAGAGSGAGAGSGAGAGSGAGAGSGAGAGSGAGAGSGAGAGSGAGAGSGAGAGSGAGAGSGAGAGSGAGAGSGAGAGSGAGAGSGAGAGSGAGAGSGAGAGSGAGAGSGAGAGSGAGAGSGAGAGSGAGAGSGAGAGSGAGAGSGAGAGSGAGAGSGAGAGSGAGAGSGAGAGSGAGAGSGAGAGSGAGAGSGAGAGSGAGAGSGAGAGSGAGAGSGAGAGSGAGAGSGAGAGSGAGAGSGAGAGSGAGAGSGAGAGSGAGAGSGAGAGSGAGAGSGAGAGSGAGAGSGAGAGSGAGAGSGAGAGSGAGAGSGAGAGSGAGAGSGAGAGSGAGAGSGAGAGSGAGAGSGAGAGSGAGAGSGAGAGSGAGAGSGAGAGSGAGAGSGAGAGSGAGAGSGAGAGSGAGAGSGAGAGSGAGAGSGAGAGSGAGAGSGAGAGSGAGAGSGAGAGSGAGAGSGAGAGSGAGAGSGAGAGSGAGAGSGAGAGSGAGAGSGAGAGSGAGAGSGAGAGSGAGAGSGAGAGSGAGAGSGAGAGSGAGAGSGAGAGSGAGAGSGAGAGSGAGAGSGAGAGSGAGAGSGAGAGSGAGAGSGAGAGSGAGAGSGAGAGSGAGAGSGAGAGSGAGAGSGAGAGSGAGAGSGAGAGSGAGAGSGAGAGSGAGAGSGAGAGSGAGAGSGAGAGSGAGAGSGAGAGSGAGAGSGAGAGSGAGAGSGAGAGSGAGAGSGAGAGSGAGAGSGAGAGSGAGAGSGAGAGSGAGAGSGAGAGSGAGAGSGAGAGSGVGVPGVGVPGVGVPGVGVPGVGVPGVGVPGVGVPGVGVPGVGVPGVGVPGVGVPGVGVPGVGVPGVGVPGVGVPGVGVPGVGVPGVGVPGVGVPGVGVPGVGVPGVGVPGVGVPGVGVPGVGVPGVGVPGVGVPGVGVPGVGVPGVGVPGVGVPGVGVPGVGVPGVGVPGVGVPGVGVPGVGVPGVGVPGVGVPGVGVPGVGVPGVGVPGVGVPGVGVPGVGVPGVGVPGVGVPGVGVPGVGVPGVGVPGVGVPGVGVPGVGVPGVGVPGVGVPGVGVPGVGVPGVGVPGVGVPGVGVPGVGVPGVGVPGVGVPGVGVPGVGVPGVGVPGVGVPGVGVPGVGVPGVGVPGVGVPGVGVPGVGVPGVGVPGVGVPGVGVPGVGVPGVGVPGVGVPGVGVPGVGVPGVGVPGVGVPGVGVPGVGVPGVGVPGVGVPGVGVPGVGVPGVGVPGVGVPGVGVPGVGVPGVGVPGVGVPGVGVPGVGVPGVGVPGVGVPGVGVPGXGVPGVGVPGVGVPGVGVPGVGVPGVGVPGVGVPGVGVPGVGVPGVGVPGVGVPGVGVPGVGVPGVGVPGVGVPGVGVPGVGVPGVGVPGVGVPGVGVPGVGVPGVGVPGVGVPGVGVPGVGVPGVGVPGVGVPGVGVPGVGVPGVGVPGVGVPGVGVPGVGVPGVGVPGVGVPGVGVPGVGVPGVGVPGVGVPGVGVPGVGVPGVGVPGVGVPGVGVPGVGVPGVGVPGVGVPGVGVPGVGVPGVGVPGVGVPGVGVPGVGVPGVGVPGVGVPGVGVPGVGVPGVGVPGVGVPGVGVPGVGVPGVGVPGVGVPGVGVPGVGVPGVGVPGVGVPGVGVPGVGVPGVGVPGVGVPGVGVPGVGVPGVGVPGVGVPGVGVPGVGVPGVGVPGVGVPGVGVPGVGVPGVGVPGVGVPGVGVPGVGVPGVGVPGVGVPGVGVPGVGVPGVGVPGVGVPGVGVPGVGVPGVGVPGVGVPGVGVPGVGVPGVGVPGVGVPGVGVPGVGVPGAGAGSGAGAGSGAGAGSGAGAGSGAGAGSGAGAGSGAGAGSGAGAGSGAGAGSGAGAGSGAGAGSGAGAGSGAGAGSGAGAGSGAGAGSGAGAGSGAGAGSGAGAGSGAGAGSGAGAGSGAGAGSGAGAGSGAGAGSGAGAGSGAGAGSGAGAGSGAGAGSGAGAGSGAGAGSGAGAGSGAGAGSGAGAGSGAGAGSGAGAGSGAGAGSGAGAGSGAGAGSGAGAGSGAGAGSGAGAGSGAGAGSGAGAGSGAGAGSGAGAGSGAGAGSGAGAGSGAGAGSGAGAGSGAGAGSGAGAGSGAGAGSGAGAGSGAGAGSGAGAGSGAGAGSGAGAGSGAGAGSGAGAGSGAGAGSGAGAGSGAGAGSGAGAGSGAGAGSGAGAGSGAGAGSGAGAGSGAGAGSGAGAGSGAGAGSGAGAGSGAGAGSGAGAGSGAGAGSGAGAGSGAGAGSGAGAGSGAGAGSGAGAGSGAGAGSGAGAGSGAGAGSGAGAGSGAGAGSGAGAGSGAGAGSGAGAGSGAGAGSGAGAGSGAGAGSGAGAGSGAGAGSGAGAGSGAGAGSGAGAGSGAGAGSGAGAGSGAGAGSGAGAGSGAGAGSGAGAGSGAGAGSGAGAGSGAGAGSGAGAGSGAGAGSGAGAGSGAGAGSGAGAGSGAGAGSGAGAGSGAGAGSGAGAGSGAGAGSGAGAGSGAGAGSGAGAGSGAGAGSGAGAGSGAGAGSGAGAGSGAGAGSGAGAGSGAGAGSGAGAGSGAGAGSGAGAGSGAGAGSGAGAGSGAGAGSGAGAGSGAGAGSGAGAGSGAGAGSGAGAGSGAGAGSGAGAGSGAGAGSGAGAGSGAGAGSGAGAGSGAGAGSGAGAGSGAGAGSGAGAGSGAGAGSGAGAGSGAGAGSGAGAGSGAGAGSGAGAGSGAGAGSGAGAGSGAGAGSGAGAGSGAGAGSGAGAGSGAGAGSGAGAGSGAGAGSGAGAGSGAGAGSGAGAGSGAGAGSGAGAGSGAGAGSGAGAGSGAGAGSGAGAGSGAGAGSGAGAGSGAGAGSGAGAGSGAGAGSGAGAGSGAGAGSGAGAGSGAGAGSGAGAGSGAGAGSGAGAGSGAGAGSGAGAGSGAGAGSGAGAGSGAGAGSGAGAGSGAGAGSGAGAGSGAGAGSGAGAGSGAGAGSGAGAGSGAGAGSGAGAGSGAGAGSGAGAGSGAGAGSGAGAGSGAGAGSGAGAGSGAGAGSGVGVPGVGVPGVGVPGVGVPGVGVPGVGVPGVGVPGVGVPGVGVPGVGVPGVGVPGVGVPGVGVPGVGVPGVGVPGVGVPGVGVPGVGVPGVGVPGVGVPGVGVPGVGVPGVGVPGVGVPGVGVPGVGVPGVGVPGVGVPGVGVPGVGVPGVGVPGVGVPGVGVPGVGVPGVGVPGVGVPGVGVPGVGVPGVGVPGVGVPGVGVPGVGVPGVGVPGVGVPGVGVPGVGVPGVGVPGVGVPGVGVPGVGVPGVGVPGVGVPGVGVPGVGVPGVGVPGVGVPGVGVPGVGVPGVGVPGVGVPGVGVPGVGVPGVGVPGVGVPGVGVPGVGVPGVGVPGVGVPGVGVPGVGVPGVGVPGVGVPGVGVPGVGVPGVGVPGVGVPGVGVPGVGVPGVGVPGVGVPGVGVPGVGVPGVGVPGVGVPGVGVPGVGVPGVGVPGVGVPGVGVPGVGVPGVGVPGVGVPGVGVPGVGVPGVGVPGVGVPGVGVPGVGVPGVGVPGVGVPGXGVPGVGVPGVGVPGVGVPGVGVPGVGVPGVGVPGVGVPGVGVPGVGVPGVGVPGVGVPGVGVPGVGVPGVGVPGVGVPGVGVPGVGVPGVGVPGVGVPGVGVPGVGVPGVGVPGVGVPGVGVPGVGVPGVGVPGVGVPGVGVPGVGVPGVGVPGVGVPGVGVPGVGVPGVGVPGVGVPGVGVPGVGVPGVGVPGVGVPGVGVPGVGVPGVGVPGVGVPGVGVPGVGVPGVGVPGVGVPGVGVPGVGVPGVGVPGVGVPGVGVPGVGVPGVGVPGVGVPGVGVPGVGVPGVGVPGVGVPGVGVPGVGVPGVGVPGVGVPGVGVPGVGVPGVGVPGVGVPGVGVPGVGVPGVGVPGVGVPGVGVPGVGVPGVGVPGVGVPGVGVPGVGVPGVGVPGVGVPGVGVPGVGVPGVGVPGVGVPGVGVPGVGVPGVGVPGVGVPGVGVPGVGVPGVGVPGVGVPGVGVPGVGVPGVGVPGVGVPGVGVPGVGVPGVGVPGVGVPGVGVPGAGAGSGAGAGSGAGAGSGAGAGSGAGAGSGAGAGSGAGAGSGAGAGSGAGAGSGAGAGSGAGAGSGAGAGSGAGAGSGAGAGSGAGAGSGAGAGSGAGAGSGAGAGSGAGAGSGAGAGSGAGAGSGAGAGSGAGAGSGAGAGSGAGAGSGAGAGSGAGAGSGAGAGSGAGAGSGAGAGSGAGAGSGAGAGSGAGAGSGAGAGSGAGAGSGAGAGSGAGAGSGAGAGSGAGAGSGAGAGSGAGAGSGAGAGSGAGAGSGAGAGSGAGAGSGAGAGSGAGAGSGAGAGSGAGAGSGAGAGSGAGAGSGAGAGSGAGAGSGAGAGSGAGAGSGAGAGSGAGAGSGAGAGSGAGAGSGAGAGSGAGAGSGAGAGSGAGAGSGAGAGSGAGAGSGAGAGSGAGAGSGAGAGSGAGAGSGAGAGSGAGAGSGAGAGSGAGAGSGAGAGSGAGAGSGAGAGSGAGAGSGAGAGSGAGAGSGAGAGSGAGAGSGAGAGSGAGAGSGAGAGSGAGAGSGAGAGSGAGAGSGAGAGSGAGAGSGAGAGSGAGAGSGAGAGSGAGAGSGAGAGSGAGAGSGAGAGSGAGAGSGAGAGSGAGAGSGAGAGSGAGAGSGAGAGSGAGAGSGAGAGSGAGAGSGAGAGSGAGAGSGAGAGSGAGAGSGAGAGSGAGAGSGAGAGSGAGAGSGAGAGSGAGAGSGAGAGSGAGAGSGAGAGSGAGAGSGAGAGSGAGAGSGAGAGSGAGAGSGAGAGSGAGAGSGAGAGSGAGAGSGAGAGSGAGAGSGAGAGSGAGAGSGAGAGSGAGAGSGAGAGSGAGAGSGAGAGSGAGAGSGAGAGSGAGAGSGAGAGSGAGAGSGAGAGSGAGAGSGAGAGSGAGAGSGAGAGSGAGAGSGAGAGSGAGAGSGAGAGSGAGAGSGAGAGSGAGAGSGAGAGSGAGAGSGAGAGSGAGAGSGAGAGSGAGAGSGAGAGSGAGAGSGAGAGSGAGAGSGAGAGSGAGAGSGAGAGSGAGAGSGAGAGSGAGAGSGAGAGSGAGAGSGAGAGSGAGAGSGAGAGSGAGAGSGAGAGSGAGAGSGAGAGSGAGAGSGAGAGSGAGAGSGAGAGSGAGAGSGAGAGSGAGAGSGAGAGSGAGAGSGAGAGSGAGAGSGAGAGSGAGAGSGAGAGSGAGAGSGAGAGSGAGAGSGAGAGSGAGAGSGAGAGSGAGAGSGAGAGSGAGAGSGVGVPGVGVPGVGVPGVGVPGVGVPGVGVPGVGVPGVGVPGVGVPGVGVPGVGVPGVGVPGVGVPGVGVPGVGVPGVGVPGVGVPGVGVPGVGVPGVGVPGVGVPGVGVPGVGVPGVGVPGVGVPGVGVPGVGVPGVGVPGVGVPGVGVPGVGVPGVGVPGVGVPGVGVPGVGVPGVGVPGVGVPGVGVPGVGVPGVGVPGVGVPGVGVPGVGVPGVGVPGVGVPGVGVPGVGVPGVGVPGVGVPGVGVPGVGVPGVGVPGVGVPGVGVPGVGVPGVGVPGVGVPGVGVPGVGVPGVGVPGVGVPGVGVPGVGVPGVGVPGVGVPGVGVPGVGVPGVGVPGVGVPGVGVPGVGVPGVGVPGVGVPGVGVPGVGVPGVGVPGVGVPGVGVPGVGVPGVGVPGVGVPGVGVPGVGVPGVGVPGVGVPGVGVPGVGVPGVGVPGVGVPGVGVPGVGVPGVGVPGVGVPGVGVPGVGVPGVGVPGVGVPGVGVPGVGVPGVGVPGXGVPGVGVPGVGVPGVGVPGVGVPGVGVPGVGVPGVGVPGVGVPGVGVPGVGVPGVGVPGVGVPGVGVPGVGVPGVGVPGVGVPGVGVPGVGVPGVGVPGVGVPGVGVPGVGVPGVGVPGVGVPGVGVPGVGVPGVGVPGVGVPGVGVPGVGVPGVGVPGVGVPGVGVPGVGVPGVGVPGVGVPGVGVPGVGVPGVGVPGVGVPGVGVPGVGVPGVGVPGVGVPGVGVPGVGVPGVGVPGVGVPGVGVPGVGVPGVGVPGVGVPGVGVPGVGVPGVGVPGVGVPGVGVPGVGVPGVGVPGVGVPGVGVPGVGVPGVGVPGVGVPGVGVPGVGVPGVGVPGVGVPGVGVPGVGVPGVGVPGVGVPGVGVPGVGVPGVGVPGVGVPGVGVPGVGVPGVGVPGVGVPGVGVPGVGVPGVGVPGVGVPGVGVPGVGVPGVGVPGVGVPGVGVPGVGVPGVGVPGVGVPGVGVPGVGVPGVGVPGVGVPGVGVPGVGVPGVGVPGVGVPGAGAGSGAGAGSGAGAGSGAGAGSGAGAGSGAGAGSGAGAGSGAGAGSGAGAGSGAGAGSGAGAGSGAGAGSGAGAGSGAGAGSGAGAGSGAGAGSGAGAGSGAGAGSGAGAGSGAGAGSGAGAGSGAGAGSGAGAGSGAGAGSGAGAGSGAGAGSGAGAGSGAGAGSGAGAGSGAGAGSGAGAGSGAGAGSGAGAGSGAGAGSGAGAGSGAGAGSGAGAGSGAGAGSGAGAGSGAGAGSGAGAGSGAGAGSGAGAGSGAGAGSGAGAGSGAGAGSGAGAGSGAGAGSGAGAGSGAGAGSGAGAGSGAGAGSGAGAGSGAGAGSGAGAGSGAGAGSGAGAGSGAGAGSGAGAGSGAGAGSGAGAGSGAGAGSGAGAGSGAGAGSGAGAGSGAGAGSGAGAGSGAGAGSGAGAGSGAGAGSGAGAGSGAGAGSGAGAGSGAGAGSGAGAGSGAGAGSGAGAGSGAGAGSGAGAGSGAGAGSGAGAGSGAGAGSGAGAGSGAGAGSGAGAGSGAGAGSGAGAGSGAGAGSGAGAGSGAGAGSGAGAGSGAGAGSGAGAGSGAGAGSGAGAGSGAGAGSGAGAGSGAGAGSGAGAGSGAGAGSGAGAGSGAGAGSGAGAGSGAGAGSGAGAGSGAGAGSGAGAGSGAGAGSGAGAGSGAGAGSGAGAGSGAGAGSGAGAGSGAGAGSGAGAGSGAGAGSGAGAGSGAGAGSGAGAGSGAGAGSGAGAGSGAGAGSGAGAGSGAGAGSGAGAGSGAGAGSGAGAGSGAGAGSGAGAGSGAGAGSGAGAGSGAGAGSGAGAGSGAGAGSGAGAGSGAGAGSGAGAGSGAGAGSGAGAGSGAGAGSGAGAGSGAGAGSGAGAGSGAGAGSGAGAGSGAGAGSGAGAGSGAGAGSGAGAGSGAGAGSGAGAGSGAGAGSGAGAGSGAGAGSGAGAGSGAGAGSGAGAGSGAGAGSGAGAGSGAGAGSGAGAGSGAGAGSGAGAGSGAGAGSGAGAGSGAGAGSGAGAGSGAGAGSGAGAGSGAGAGSGAGAGSGAGAGSGAGAGSGAGAGSGAGAGSGAGAGSGAGAGSGAGAGSGAGAGSGAGAGSGAGAGSGAGAGSGAGAGSGAGAGSGAGAGSGAGAGSGAGAGSGAGAGSGAGAGSGAGAGSGAGAGSGAGAGSGAGAGSGAGAGSGAGAGSGAGAGSGAGAGSGAGAGSGAGAGSGAGAGSGAGAGSGVGVPGVGVPGVGVPGVGVPGVGVPGVGVPGVGVPGVGVPGVGVPGVGVPGVGVPGVGVPGVGVPGVGVPGVGVPGVGVPGVGVPGVGVPGVGVPGVGVPGVGVPGVGVPGVGVPGVGVPGVGVPGVGVPGVGVPGVGVPGVGVPGVGVPGVGVPGVGVPGVGVPGVGVPGVGVPGVGVPGVGVPGVGVPGVGVPGVGVPGVGVPGVGVPGVGVPGVGVPGVGVPGVGVPGVGVPGVGVPGVGVPGVGVPGVGVPGVGVPGVGVPGVGVPGVGVPGVGVPGVGVPGVGVPGVGVPGVGVPGVGVPGVGVPGVGVPGVGVPGVGVPGVGVPGVGVPGVGVPGVGVPGVGVPGVGVPGVGVPGVGVPGVGVPGVGVPGVGVPGVGVPGVGVPGVGVPGVGVPGVGVPGVGVPGVGVPGVGVPGVGVPGVGVPGVGVPGVGVPGVGVPGVGVPGVGVPGVGVPGVGVPGVGVPGVGVPGVGVPGVGVPGVGVPGVGVPGVGVPGXGVPGVGVPGVGVPGVGVPGVGVPGVGVPGVGVPGVGVPGVGVPGVGVPGVGVPGVGVPGVGVPGVGVPGVGVPGVGVPGVGVPGVGVPGVGVPGVGVPGVGVPGVGVPGVGVPGVGVPGVGVPGVGVPGVGVPGVGVPGVGVPGVGVPGVGVPGVGVPGVGVPGVGVPGVGVPGVGVPGVGVPGVGVPGVGVPGVGVPGVGVPGVGVPGVGVPGVGVPGVGVPGVGVPGVGVPGVGVPGVGVPGVGVPGVGVPGVGVPGVGVPGVGVPGVGVPGVGVPGVGVPGVGVPGVGVPGVGVPGVGVPGVGVPGVGVPGVGVPGVGVPGVGVPGVGVPGVGVPGVGVPGVGVPGVGVPGVGVPGVGVPGVGVPGVGVPGVGVPGVGVPGVGVPGVGVPGVGVPGVGVPGVGVPGVGVPGVGVPGVGVPGVGVPGVGVPGVGVPGVGVPGVGVPGVGVPGVGVPGVGVPGVGVPGVGVPGVGVPGVGVPGVGVPGVGVPGVGVPGVGVPGAGAGSGAGAGSGAGAGSGAGAGSGAGAGSGAGAGSGAGAGSGAGAGSGAGAGSGAGAGSGAGAGSGAGAGSGAGAGSGAGAGSGAGAGSGAGAGSGAGAGSGAGAGSGAGAGSGAGAGSGAGAGSGAGAGSGAGAGSGAGAGSGAGAGSGAGAGSGAGAGSGAGAGSGAGAGSGAGAGSGAGAGSGAGAGSGAGAGSGAGAGSGAGAGSGAGAGSGAGAGSGAGAGSGAGAGSGAGAGSGAGAGSGAGAGSGAGAGSGAGAGSGAGAGSGAGAGSGAGAGSGAGAGSGAGAGSGAGAGSGAGAGSGAGAGSGAGAGSGAGAGSGAGAGSGAGAGSGAGAGSGAGAGSGAGAGSGAGAGSGAGAGSGAGAGSGAGAGSGAGAGSGAGAGSGAGAGSGAGAGSGAGAGSGAGAGSGAGAGSGAGAGSGAGAGSGAGAGSGAGAGSGAGAGSGAGAGSGAGAGSGAGAGSGAGAGSGAGAGSGAGAGSGAGAGSGAGAGSGAGAGSGAGAGSGAGAGSGAGAGSGAGAGSGAGAGSGAGAGSGAGAGSGAGAGSGAGAGSGAGAGSGAGAGSGAGAGSGAGAGSGAGAGSGAGAGSGAGAGSGAGAGSGAGAGSGAGAGSGAGAGSGAGAGSGAGAGSGAGAGSGAGAGSGAGAGSGAGAGSGAGAGSGAGAGSGAGAGSGAGAGSGAGAGSGAGAGSGAGAGSGAGAGSGAGAGSGAGAGSGAGAGSGAGAGSGAGAGSGAGAGSGAGAGSGAGAGSGAGAGSGAGAGSGAGAGSGAGAGSGAGAGSGAGAGSGAGAGSGAGAGSGAGAGSGAGAGSGAGAGSGAGAGSGAGAGSGAGAGSGAGAGSGAGAGSGAGAGSGAGAGSGAGAGSGAGAGSGAGAGSGAGAGSGAGAGSGAGAGSGAGAGSGAGAGSGAGAGSGAGAGSGAGAGSGAGAGSGAGAGSGAGAGSGAGAGSGAGAGSGAGAGSGAGAGSGAGAGSGAGAGSGAGAGSGAGAGSGAGAGSGAGAGSGAGAGSGAGAGSGAGAGSGAGAGSGAGAGSGAGAGSGAGAGSGAGAGSGAGAGSGAGAGSGAGAGSGAGAGSGAGAGSGAGAGSGAGAGSGAGAGSGAGAGSGAGAGSGAGAGSGAGAGSGAGAGSGAGAGSGAGAGSGAGAGSGAGAGSGAGAGSGAGAGSGAGAGSGAGAGSGAGAGSGAGAGSGAGAGSGAGAGSGVGVPGVGVPGVGVPGVGVPGVGVPGVGVPGVGVPGVGVPGVGVPGVGVPGVGVPGVGVPGVGVPGVGVPGVGVPGVGVPGVGVPGVGVPGVGVPGVGVPGVGVPGVGVPGVGVPGVGVPGVGVPGVGVPGVGVPGVGVPGVGVPGVGVPGVGVPGVGVPGVGVPGVGVPGVGVPGVGVPGVGVPGVGVPGVGVPGVGVPGVGVPGVGVPGVGVPGVGVPGVGVPGVGVPGVGVPGVGVPGVGVPGVGVPGVGVPGVGVPGVGVPGVGVPGVGVPGVGVPGVGVPGVGVPGVGVPGVGVPGVGVPGVGVPGVGVPGVGVPGVGVPGVGVPGVGVPGVGVPGVGVPGVGVPGVGVPGVGVPGVGVPGVGVPGVGVPGVGVPGVGVPGVGVPGVGVPGVGVPGVGVPGVGVPGVGVPGVGVPGVGVPGVGVPGVGVPGVGVPGVGVPGVGVPGVGVPGVGVPGVGVPGVGVPGVGVPGVGVPGVGVPGVGVPGVGVPGVGVPGXGVPGVGVPGVGVPGVGVPGVGVPGVGVPGVGVPGVGVPGVGVPGVGVPGVGVPGVGVPGVGVPGVGVPGVGVPGVGVPGVGVPGVGVPGVGVPGVGVPGVGVPGVGVPGVGVPGVGVPGVGVPGVGVPGVGVPGVGVPGVGVPGVGVPGVGVPGVGVPGVGVPGVGVPGVGVPGVGVPGVGVPGVGVPGVGVPGVGVPGVGVPGVGVPGVGVPGVGVPGVGVPGVGVPGVGVPGVGVPGVGVPGVGVPGVGVPGVGVPGVGVPGVGVPGVGVPGVGVPGVGVPGVGVPGVGVPGVGVPGVGVPGVGVPGVGVPGVGVPGVGVPGVGVPGVGVPGVGVPGVGVPGVGVPGVGVPGVGVPGVGVPGVGVPGVGVPGVGVPGVGVPGVGVPGVGVPGVGVPGVGVPGVGVPGVGVPGVGVPGVGVPGVGVPGVGVPGVGVPGVGVPGVGVPGVGVPGVGVPGVGVPGVGVPGVGVPGVGVPGVGVPGVGVPGVGVPGVGVPGVGVPGAGAGSGAGAGSGAGAGSGAGAGSGAGAGSGAGAGSGAGAGSGAGAGSGAGAGSGAGAGSGAGAGSGAGAGSGAGAGSGAGAGSGAGAGSGAGAGSGAGAGSGAGAGSGAGAGSGAGAGSGAGAGSGAGAGSGAGAGSGAGAGSGAGAGSGAGAGSGAGAGSGAGAGSGAGAGSGAGAGSGAGAGSGAGAGSGAGAGSGAGAGSGAGAGSGAGAGSGAGAGSGAGAGSGAGAGSGAGAGSGAGAGSGAGAGSGAGAGSGAGAGSGAGAGSGAGAGSGAGAGSGAGAGSGAGAGSGAGAGSGAGAGSGAGAGSGAGAGSGAGAGSGAGAGSGAGAGSGAGAGSGAGAGSGAGAGSGAGAGSGAGAGSGAGAGSGAGAGSGAGAGSGAGAGSGAGAGSGAGAGSGAGAGSGAGAGSGAGAGSGAGAGSGAGAGSGAGAGSGAGAGSGAGAGSGAGAGSGAGAGSGAGAGSGAGAGSGAGAGSGAGAGSGAGAGSGAGAGSGAGAGSGAGAGSGAGAGSGAGAGSGAGAGSGAGAGSGAGAGSGAGAGSGAGAGSGAGAGSGAGAGSGAGAGSGAGAGSGAGAGSGAGAGSGAGAGSGAGAGSGAGAGSGAGAGSGAGAGSGAGAGSGAGAGSGAGAGSGAGAGSGAGAGSGAGAGSGAGAGSGAGAGSGAGAGSGAGAGSGAGAGSGAGAGSGAGAGSGAGAGSGAGAGSGAGAGSGAGAGSGAGAGSGAGAGSGAGAGSGAGAGSGAGAGSGAGAGSGAGAGSGAGAGSGAGAGSGAGAGSGAGAGSGAGAGSGAGAGSGAGAGSGAGAGSGAGAGSGAGAGSGAGAGSGAGAGSGAGAGSGAGAGSGAGAGSGAGAGSGAGAGSGAGAGSGAGAGSGAGAGSGAGAGSGAGAGSGAGAGSGAGAGSGAGAGSGAGAGSGAGAGSGAGAGSGAGAGSGAGAGSGAGAGSGAGAGSGAGAGSGAGAGSGAGAGSGAGAGSGAGAGSGAGAGSGAGAGSGAGAGSGAGAGSGAGAGSGAGAGSGAGAGSGAGAGSGAGAGSGAGAGSGAGAGSGAGAGSGAGAGSGAGAGSGAGAGSGAGAGSGAGAGSGAGAGSGAGAGSGAGAGSGAGAGSGAGAGSGAGAGSGAGAGSGAGAGSGAGAGSGAGAGSGAGAGSGAGAGSGAGAGSGAGAGSGAGAGSGAGAGSGAGAGSGAGAGSGAGAGSGAGAGSGVGVPGVGVPGVGVPGVGVPGVGVPGVGVPGVGVPGVGVPGVGVPGVGVPGVGVPGVGVPGVGVPGVGVPGVGVPGVGVPGVGVPGVGVPGVGVPGVGVPGVGVPGVGVPGVGVPGVGVPGVGVPGVGVPGVGVPGVGVPGVGVPGVGVPGVGVPGVGVPGVGVPGVGVPGVGVPGVGVPGVGVPGVGVPGVGVPGVGVPGVGVPGVGVPGVGVPGVGVPGVGVPGVGVPGVGVPGVGVPGVGVPGVGVPGVGVPGVGVPGVGVPGVGVPGVGVPGVGVPGVGVPGVGVPGVGVPGVGVPGVGVPGVGVPGVGVPGVGVPGVGVPGVGVPGVGVPGVGVPGVGVPGVGVPGVGVPGVGVPGVGVPGVGVPGVGVPGVGVPGVGVPGVGVPGVGVPGVGVPGVGVPGVGVPGVGVPGVGVPGVGVPGVGVPGVGVPGVGVPGVGVPGVGVPGVGVPGVGVPGVGVPGVGVPGVGVPGVGVPGVGVPGVGVPGVGVPGVGVPGXGVPGVGVPGVGVPGVGVPGVGVPGVGVPGVGVPGVGVPGVGVPGVGVPGVGVPGVGVPGVGVPGVGVPGVGVPGVGVPGVGVPGVGVPGVGVPGVGVPGVGVPGVGVPGVGVPGVGVPGVGVPGVGVPGVGVPGVGVPGVGVPGVGVPGVGVPGVGVPGVGVPGVGVPGVGVPGVGVPGVGVPGVGVPGVGVPGVGVPGVGVPGVGVPGVGVPGVGVPGVGVPGVGVPGVGVPGVGVPGVGVPGVGVPGVGVPGVGVPGVGVPGVGVPGVGVPGVGVPGVGVPGVGVPGVGVPGVGVPGVGVPGVGVPGVGVPGVGVPGVGVPGVGVPGVGVPGVGVPGVGVPGVGVPGVGVPGVGVPGVGVPGVGVPGVGVPGVGVPGVGVPGVGVPGVGVPGVGVPGVGVPGVGVPGVGVPGVGVPGVGVPGVGVPGVGVPGVGVPGVGVPGVGVPGVGVPGVGVPGVGVPGVGVPGVGVPGVGVPGVGVPGVGVPGVGVPGVGVPGVGVPGAGAGSGAGAGSGAGAGSGAGAGSGAGAGSGAGAGSGAGAGSGAGAGSGAGAGSGAGAGSGAGAGSGAGAGSGAGAGSGAGAGSGAGAGSGAGAGSGAGAGSGAGAGSGAGAGSGAGAGSGAGAGSGAGAGSGAGAGSGAGAGSGAGAGSGAGAGSGAGAGSGAGAGSGAGAGSGAGAGSGAGAGSGAGAGSGAGAGSGAGAGSGAGAGSGAGAGSGAGAGSGAGAGSGAGAGSGAGAGSGAGAGSGAGAGSGAGAGSGAGAGSGAGAGSGAGAGSGAGAGSGAGAGSGAGAGSGAGAGSGAGAGSGAGAGSGAGAGSGAGAGSGAGAGSGAGAGSGAGAGSGAGAGSGAGAGSGAGAGSGAGAGSGAGAGSGAGAGSGAGAGSGAGAGSGAGAGSGAGAGSGAGAGSGAGAGSGAGAGSGAGAGSGAGAGSGAGAGSGAGAGSGAGAGSGAGAGSGAGAGSGAGAGSGAGAGSGAGAGSGAGAGSGAGAGSGAGAGSGAGAGSGAGAGSGAGAGSGAGAGSGAGAGSGAGAGSGAGAGSGAGAGSGAGAGSGAGAGSGAGAGSGAGAGSGAGAGSGAGAGSGAGAGSGAGAGSGAGAGSGAGAGSGAGAGSGAGAGSGAGAGSGAGAGSGAGAGSGAGAGSGAGAGSGAGAGSGAGAGSGAGAGSGAGAGSGAGAGSGAGAGSGAGAGSGAGAGSGAGAGSGAGAGSGAGAGSGAGAGSGAGAGSGAGAGSGAGAGSGAGAGSGAGAGSGAGAGSGAGAGSGAGAGSGAGAGSGAGAGSGAGAGSGAGAGSGAGAGSGAGAGSGAGAGSGAGAGSGAGAGSGAGAGSGAGAGSGAGAGSGAGAGSGAGAGSGAGAGSGAGAGSGAGAGSGAGAGSGAGAGSGAGAGSGAGAGSGAGAGSGAGAGSGAGAGSGAGAGSGAGAGSGAGAGSGAGAGSGAGAGSGAGAGSGAGAGSGAGAGSGAGAGSGAGAGSGAGAGSGAGAGSGAGAGSGAGAGSGAGAGSGAGAGSGAGAGSGAGAGSGAGAGSGAGAGSGAGAGSGAGAGSGAGAGSGAGAGSGAGAGSGAGAGSGAGAGSGAGAGSGAGAGSGAGAGSGAGAGSGAGAGSGAGAGSGAGAGSGAGAGSGAGAGSGAGAGSGAGAGSGAGAGSGAGAGSGAGAGSGAGAGSGAGAGSGAGAGSGAGAGSGAGAGSGAGAGSGAGAGSGAGAGSGVGVPGVGVPGVGVPGVGVPGVGVPGVGVPGVGVPGVGVPGVGVPGVGVPGVGVPGVGVPGVGVPGVGVPGVGVPGVGVPGVGVPGVGVPGVGVPGVGVPGVGVPGVGVPGVGVPGVGVPGVGVPGVGVPGVGVPGVGVPGVGVPGVGVPGVGVPGVGVPGVGVPGVGVPGVGVPGVGVPGVGVPGVGVPGVGVPGVGVPGVGVPGVGVPGVGVPGVGVPGVGVPGVGVPGVGVPGVGVPGVGVPGVGVPGVGVPGVGVPGVGVPGVGVPGVGVPGVGVPGVGVPGVGVPGVGVPGVGVPGVGVPGVGVPGVGVPGVGVPGVGVPGVGVPGVGVPGVGVPGVGVPGVGVPGVGVPGVGVPGVGVPGVGVPGVGVPGVGVPGVGVPGVGVPGVGVPGVGVPGVGVPGVGVPGVGVPGVGVPGVGVPGVGVPGVGVPGVGVPGVGVPGVGVPGVGVPGVGVPGVGVPGVGVPGVGVPGVGVPGVGVPGVGVPGVGVPGVGVPGXGVPGVGVPGVGVPGVGVPGVGVPGVGVPGVGVPGVGVPGVGVPGVGVPGVGVPGVGVPGVGVPGVGVPGVGVPGVGVPGVGVPGVGVPGVGVPGVGVPGVGVPGVGVPGVGVPGVGVPGVGVPGVGVPGVGVPGVGVPGVGVPGVGVPGVGVPGVGVPGVGVPGVGVPGVGVPGVGVPGVGVPGVGVPGVGVPGVGVPGVGVPGVGVPGVGVPGVGVPGVGVPGVGVPGVGVPGVGVPGVGVPGVGVPGVGVPGVGVPGVGVPGVGVPGVGVPGVGVPGVGVPGVGVPGVGVPGVGVPGVGVPGVGVPGVGVPGVGVPGVGVPGVGVPGVGVPGVGVPGVGVPGVGVPGVGVPGVGVPGVGVPGVGVPGVGVPGVGVPGVGVPGVGVPGVGVPGVGVPGVGVPGVGVPGVGVPGVGVPGVGVPGVGVPGVGVPGVGVPGVGVPGVGVPGVGVPGVGVPGVGVPGVGVPGVGVPGVGVPGVGVPGVGVPGVGVPGVGVPGVGVPGAGAGSGAGAGSGAGAGSGAGAGSGAGAGSGAGAGSGAGAGSGAGAGSGAGAGSGAGAGSGAGAGSGAGAGSGAGAGSGAGAGSGAGAGSGAGAGSGAGAGSGAGAGSGAGAGSGAGAGSGAGAGSGAGAGSGAGAGSGAGAGSGAGAGSGAGAGSGAGAGSGAGAGSGAGAGSGAGAGSGAGAGSGAGAGSGAGAGSGAGAGSGAGAGSGAGAGSGAGAGSGAGAGSGAGAGSGAGAGSGAGAGSGAGAGSGAGAGSGAGAGSGAGAGSGAGAGSGAGAGSGAGAGSGAGAGSGAGAGSGAGAGSGAGAGSGAGAGSGAGAGSGAGAGSGAGAGSGAGAGSGAGAGSGAGAGSGAGAGSGAGAGSGAGAGSGAGAGSGAGAGSGAGAGSGAGAGSGAGAGSGAGAGSGAGAGSGAGAGSGAGAGSGAGAGSGAGAGSGAGAGSGAGAGSGAGAGSGAGAGSGAGAGSGAGAGSGAGAGSGAGAGSGAGAGSGAGAGSGAGAGSGAGAGSGAGAGSGAGAGSGAGAGSGAGAGSGAGAGSGAGAGSGAGAGSGAGAGSGAGAGSGAGAGSGAGAGSGAGAGSGAGAGSGAGAGSGAGAGSGAGAGSGAGAGSGAGAGSGAGAGSGAGAGSGAGAGSGAGAGSGAGAGSGAGAGSGAGAGSGAGAGSGAGAGSGAGAGSGAGAGSGAGAGSGAGAGSGAGAGSGAGAGSGAGAGSGAGAGSGAGAGSGAGAGSGAGAGSGAGAGSGAGAGSGAGAGSGAGAGSGAGAGSGAGAGSGAGAGSGAGAGSGAGAGSGAGAGSGAGAGSGAGAGSGAGAGSGAGAGSGAGAGSGAGAGSGAGAGSGAGAGSGAGAGSGAGAGSGAGAGSGAGAGSGAGAGSGAGAGSGAGAGSGAGAGSGAGAGSGAGAGSGAGAGSGAGAGSGAGAGSGAGAGSGAGAGSGAGAGSGAGAGSGAGAGSGAGAGSGAGAGSGAGAGSGAGAGSGAGAGSGAGAGSGAGAGSGAGAGSGAGAGSGAGAGSGAGAGSGAGAGSGAGAGSGAGAGSGAGAGSGAGAGSGAGAGSGAGAGSGAGAGSGAGAGSGAGAGSGAGAGSGAGAGSGAGAGSGAGAGSGAGAGSGAGAGSGAGAGSGAGAGSGAGAGSGAGAGSGAGAGSGAGAGSGAGAGSGAGAGSGAGAGSGAGAGSGAGAGSGAGAGSGAGAGSGAGAGSGAGAGSGVGVPGVGVPGVGVPGVGVPGVGVPGVGVPGVGVPGVGVPGVGVPGVGVPGVGVPGVGVPGVGVPGVGVPGVGVPGVGVPGVGVPGVGVPGVGVPGVGVPGVGVPGVGVPGVGVPGVGVPGVGVPGVGVPGVGVPGVGVPGVGVPGVGVPGVGVPGVGVPGVGVPGVGVPGVGVPGVGVPGVGVPGVGVPGVGVPGVGVPGVGVPGVGVPGVGVPGVGVPGVGVPGVGVPGVGVPGVGVPGVGVPGVGVPGVGVPGVGVPGVGVPGVGVPGVGVPGVGVPGVGVPGVGVPGVGVPGVGVPGVGVPGVGVPGVGVPGVGVPGVGVPGVGVPGVGVPGVGVPGVGVPGVGVPGVGVPGVGVPGVGVPGVGVPGVGVPGVGVPGVGVPGVGVPGVGVPGVGVPGVGVPGVGVPGVGVPGVGVPGVGVPGVGVPGVGVPGVGVPGVGVPGVGVPGVGVPGVGVPGVGVPGVGVPGVGVPGVGVPGVGVPGVGVPGVGVPGVGVPGXGVPGVGVPGVGVPGVGVPGVGVPGVGVPGVGVPGVGVPGVGVPGVGVPGVGVPGVGVPGVGVPGVGVPGVGVPGVGVPGVGVPGVGVPGVGVPGVGVPGVGVPGVGVPGVGVPGVGVPGVGVPGVGVPGVGVPGVGVPGVGVPGVGVPGVGVPGVGVPGVGVPGVGVPGVGVPGVGVPGVGVPGVGVPGVGVPGVGVPGVGVPGVGVPGVGVPGVGVPGVGVPGVGVPGVGVPGVGVPGVGVPGVGVPGVGVPGVGVPGVGVPGVGVPGVGVPGVGVPGVGVPGVGVPGVGVPGVGVPGVGVPGVGVPGVGVPGVGVPGVGVPGVGVPGVGVPGVGVPGVGVPGVGVPGVGVPGVGVPGVGVPGVGVPGVGVPGVGVPGVGVPGVGVPGVGVPGVGVPGVGVPGVGVPGVGVPGVGVPGVGVPGVGVPGVGVPGVGVPGVGVPGVGVPGVGVPGVGVPGVGVPGVGVPGVGVPGVGVPGVGVPGVGVPGVGVPGVGVPGVGVPGAGAGSGAGAGSGAGAGSGAGAGSGAGAGSGAGAGSGAGAGSGAGAGSGAGAGSGAGAGSGAGAGSGAGAGSGAGAGSGAGAGSGAGAGSGAGAGSGAGAGSGAGAGSGAGAGSGAGAGSGAGAGSGAGAGSGAGAGSGAGAGSGAGAGSGAGAGSGAGAGSGAGAGSGAGAGSGAGAGSGAGAGSGAGAGSGAGAGSGAGAGSGAGAGSGAGAGSGAGAGSGAGAGSGAGAGSGAGAGSGAGAGSGAGAGSGAGAGSGAGAGSGAGAGSGAGAGSGAGAGSGAGAGSGAGAGSGAGAGSGAGAGSGAGAGSGAGAGSGAGAGSGAGAGSGAGAGSGAGAGSGAGAGSGAGAGSGAGAGSGAGAGSGAGAGSGAGAGSGAGAGSGAGAGSGAGAGSGAGAGSGAGAGSGAGAGSGAGAGSGAGAGSGAGAGSGAGAGSGAGAGSGAGAGSGAGAGSGAGAGSGAGAGSGAGAGSGAGAGSGAGAGSGAGAGSGAGAGSGAGAGSGAGAGSGAGAGSGAGAGSGAGAGSGAGAGSGAGAGSGAGAGSGAGAGSGAGAGSGAGAGSGAGAGSGAGAGSGAGAGSGAGAGSGAGAGSGAGAGSGAGAGSGAGAGSGAGAGSGAGAGSGAGAGSGAGAGSGAGAGSGAGAGSGAGAGSGAGAGSGAGAGSGAGAGSGAGAGSGAGAGSGAGAGSGAGAGSGAGAGSGAGAGSGAGAGSGAGAGSGAGAGSGAGAGSGAGAGSGAGAGSGAGAGSGAGAGSGAGAGSGAGAGSGAGAGSGAGAGSGAGAGSGAGAGSGAGAGSGAGAGSGAGAGSGAGAGSGAGAGSGAGAGSGAGAGSGAGAGSGAGAGSGAGAGSGAGAGSGAGAGSGAGAGSGAGAGSGAGAGSGAGAGSGAGAGSGAGAGSGAGAGSGAGAGSGAGAGSGAGAGSGAGAGSGAGAGSGAGAGSGAGAGSGAGAGSGAGAGSGAGAGSGAGAGSGAGAGSGAGAGSGAGAGSGAGAGSGAGAGSGAGAGSGAGAGSGAGAGSGAGAGSGAGAGSGAGAGSGAGAGSGAGAGSGAGAGSGAGAGSGAGAGSGAGAGSGAGAGSGAGAGSGAGAGSGAGAGSGAGAGSGAGAGSGAGAGSGAGAGSGAGAGSGAGAGSGAGAGSGAGAGSGAGAGSGAGAGSGAGAGSGAGAGSGAGAGSGAGAGSGAGAGSGAGAGSGAGAGSGAGAGSGVGVPGVGVPGVGVPGVGVPGVGVPGVGVPGVGVPGVGVPGVGVPGVGVPGVGVPGVGVPGVGVPGVGVPGVGVPGVGVPGVGVPGVGVPGVGVPGVGVPGVGVPGVGVPGVGVPGVGVPGVGVPGVGVPGVGVPGVGVPGVGVPGVGVPGVGVPGVGVPGVGVPGVGVPGVGVPGVGVPGVGVPGVGVPGVGVPGVGVPGVGVPGVGVPGVGVPGVGVPGVGVPGVGVPGVGVPGVGVPGVGVPGVGVPGVGVPGVGVPGVGVPGVGVPGVGVPGVGVPGVGVPGVGVPGVGVPGVGVPGVGVPGVGVPGVGVPGVGVPGVGVPGVGVPGVGVPGVGVPGVGVPGVGVPGVGVPGVGVPGVGVPGVGVPGVGVPGVGVPGVGVPGVGVPGVGVPGVGVPGVGVPGVGVPGVGVPGVGVPGVGVPGVGVPGVGVPGVGVPGVGVPGVGVPGVGVPGVGVPGVGVPGVGVPGVGVPGVGVPGVGVPGVGVPGVGVPGVGVPGXGVPGVGVPGVGVPGVGVPGVGVPGVGVPGVGVPGVGVPGVGVPGVGVPGVGVPGVGVPGVGVPGVGVPGVGVPGVGVPGVGVPGVGVPGVGVPGVGVPGVGVPGVGVPGVGVPGVGVPGVGVPGVGVPGVGVPGVGVPGVGVPGVGVPGVGVPGVGVPGVGVPGVGVPGVGVPGVGVPGVGVPGVGVPGVGVPGVGVPGVGVPGVGVPGVGVPGVGVPGVGVPGVGVPGVGVPGVGVPGVGVPGVGVPGVGVPGVGVPGVGVPGVGVPGVGVPGVGVPGVGVPGVGVPGVGVPGVGVPGVGVPGVGVPGVGVPGVGVPGVGVPGVGVPGVGVPGVGVPGVGVPGVGVPGVGVPGVGVPGVGVPGVGVPGVGVPGVGVPGVGVPGVGVPGVGVPGVGVPGVGVPGVGVPGVGVPGVGVPGVGVPGVGVPGVGVPGVGVPGVGVPGVGVPGVGVPGVGVPGVGVPGVGVPGVGVPGVGVPGVGVPGVGVPGVGVPGVGVPGVGVPGAGAGSGAGAGSGAGAGSGAGAGSGAGAGSGAGAGSGAGAGSGAGAGSGAGAGSGAGAGSGAGAGSGAGAGSGAGAGSGAGAGSGAGAGSGAGAGSGAGAGSGAGAGSGAGAGSGAGAGSGAGAGSGAGAGSGAGAGSGAGAGSGAGAGSGAGAGSGAGAGSGAGAGSGAGAGSGAGAGSGAGAGSGAGAGSGAGAGSGAGAGSGAGAGSGAGAGSGAGAGSGAGAGSGAGAGSGAGAGSGAGAGSGAGAGSGAGAGSGAGAGSGAGAGSGAGAGSGAGAGSGAGAGSGAGAGSGAGAGSGAGAGSGAGAGSGAGAGSGAGAGSGAGAGSGAGAGSGAGAGSGAGAGSGAGAGSGAGAGSGAGAGSGAGAGSGAGAGSGAGAGSGAGAGSGAGAGSGAGAGSGAGAGSGAGAGSGAGAGSGAGAGSGAGAGSGAGAGSGAGAGSGAGAGSGAGAGSGAGAGSGAGAGSGAGAGSGAGAGSGAGAGSGAGAGSGAGAGSGAGAGSGAGAGSGAGAGSGAGAGSGAGAGSGAGAGSGAGAGSGAGAGSGAGAGSGAGAGSGAGAGSGAGAGSGAGAGSGAGAGSGAGAGSGAGAGSGAGAGSGAGAGSGAGAGSGAGAGSGAGAGSGAGAGSGAGAGSGAGAGSGAGAGSGAGAGSGAGAGSGAGAGSGAGAGSGAGAGSGAGAGSGAGAGSGAGAGSGAGAGSGAGAGSGAGAGSGAGAGSGAGAGSGAGAGSGAGAGSGAGAGSGAGAGSGAGAGSGAGAGSGAGAGSGAGAGSGAGAGSGAGAGSGAGAGSGAGAGSGAGAGSGAGAGSGAGAGSGAGAGSGAGAGSGAGAGSGAGAGSGAGAGSGAGAGSGAGAGSGAGAGSGAGAGSGAGAGSGAGAGSGAGAGSGAGAGSGAGAGSGAGAGSGAGAGSGAGAGSGAGAGSGAGAGSGAGAGSGAGAGSGAGAGSGAGAGSGAGAGSGAGAGSGAGAGSGAGAGSGAGAGSGAGAGSGAGAGSGAGAGSGAGAGSGAGAGSGAGAGSGAGAGSGAGAGSGAGAGSGAGAGSGAGAGSGAGAGSGAGAGSGAGAGSGAGAGSGAGAGSGAGAGSGAGAGSGAGAGSGAGAGSGAGAGSGAGAGSGAGAGSGAGAGSGAGAGSGAGAGSGAGAGSGAGAGSGAGAGSGAGAGSGAGAGSGAGAGSGAGAGSGAGAGSGAGAGSGAGAGSGAGAGSGVGVPGVGVPGVGVPGVGVPGVGVPGVGVPGVGVPGVGVPGVGVPGVGVPGVGVPGVGVPGVGVPGVGVPGVGVPGVGVPGVGVPGVGVPGVGVPGVGVPGVGVPGVGVPGVGVPGVGVPGVGVPGVGVPGVGVPGVGVPGVGVPGVGVPGVGVPGVGVPGVGVPGVGVPGVGVPGVGVPGVGVPGVGVPGVGVPGVGVPGVGVPGVGVPGVGVPGVGVPGVGVPGVGVPGVGVPGVGVPGVGVPGVGVPGVGVPGVGVPGVGVPGVGVPGVGVPGVGVPGVGVPGVGVPGVGVPGVGVPGVGVPGVGVPGVGVPGVGVPGVGVPGVGVPGVGVPGVGVPGVGVPGVGVPGVGVPGVGVPGVGVPGVGVPGVGVPGVGVPGVGVPGVGVPGVGVPGVGVPGVGVPGVGVPGVGVPGVGVPGVGVPGVGVPGVGVPGVGVPGVGVPGVGVPGVGVPGVGVPGVGVPGVGVPGVGVPGVGVPGVGVPGVGVPGVGVPGVGVPGXGVPGVGVPGVGVPGVGVPGVGVPGVGVPGVGVPGVGVPGVGVPGVGVPGVGVPGVGVPGVGVPGVGVPGVGVPGVGVPGVGVPGVGVPGVGVPGVGVPGVGVPGVGVPGVGVPGVGVPGVGVPGVGVPGVGVPGVGVPGVGVPGVGVPGVGVPGVGVPGVGVPGVGVPGVGVPGVGVPGVGVPGVGVPGVGVPGVGVPGVGVPGVGVPGVGVPGVGVPGVGVPGVGVPGVGVPGVGVPGVGVPGVGVPGVGVPGVGVPGVGVPGVGVPGVGVPGVGVPGVGVPGVGVPGVGVPGVGVPGVGVPGVGVPGVGVPGVGVPGVGVPGVGVPGVGVPGVGVPGVGVPGVGVPGVGVPGVGVPGVGVPGVGVPGVGVPGVGVPGVGVPGVGVPGVGVPGVGVPGVGVPGVGVPGVGVPGVGVPGVGVPGVGVPGVGVPGVGVPGVGVPGVGVPGVGVPGVGVPGVGVPGVGVPGVGVPGVGVPGVGVPGVGVPGVGVPGVGVPGVGVPGAGAGSGAGAGSGAGAGSGAGAGSGAGAGSGAGAGSGAGAGSGAGAGSGAGAGSGAGAGSGAGAGSGAGAGSGAGAGSGAGAGSGAGAGSGAGAGSGAGAGSGAGAGSGAGAGSGAGAGSGAGAGSGAGAGSGAGAGSGAGAGSGAGAGSGAGAGSGAGAGSGAGAGSGAGAGSGAGAGSGAGAGSGAGAGSGAGAGSGAGAGSGAGAGSGAGAGSGAGAGSGAGAGSGAGAGSGAGAGSGAGAGSGAGAGSGAGAGSGAGAGSGAGAGSGAGAGSGAGAGSGAGAGSGAGAGSGAGAGSGAGAGSGAGAGSGAGAGSGAGAGSGAGAGSGAGAGSGAGAGSGAGAGSGAGAGSGAGAGSGAGAGSGAGAGSGAGAGSGAGAGSGAGAGSGAGAGSGAGAGSGAGAGSGAGAGSGAGAGSGAGAGSGAGAGSGAGAGSGAGAGSGAGAGSGAGAGSGAGAGSGAGAGSGAGAGSGAGAGSGAGAGSGAGAGSGAGAGSGAGAGSGAGAGSGAGAGSGAGAGSGAGAGSGAGAGSGAGAGSGAGAGSGAGAGSGAGAGSGAGAGSGAGAGSGAGAGSGAGAGSGAGAGSGAGAGSGAGAGSGAGAGSGAGAGSGAGAGSGAGAGSGAGAGSGAGAGSGAGAGSGAGAGSGAGAGSGAGAGSGAGAGSGAGAGSGAGAGSGAGAGSGAGAGSGAGAGSGAGAGSGAGAGSGAGAGSGAGAGSGAGAGSGAGAGSGAGAGSGAGAGSGAGAGSGAGAGSGAGAGSGAGAGSGAGAGSGAGAGSGAGAGSGAGAGSGAGAGSGAGAGSGAGAGSGAGAGSGAGAGSGAGAGSGAGAGSGAGAGSGAGAGSGAGAGSGAGAGSGAGAGSGAGAGSGAGAGSGAGAGSGAGAGSGAGAGSGAGAGSGAGAGSGAGAGSGAGAGSGAGAGSGAGAGSGAGAGSGAGAGSGAGAGSGAGAGSGAGAGSGAGAGSGAGAGSGAGAGSGAGAGSGAGAGSGAGAGSGAGAGSGAGAGSGAGAGSGAGAGSGAGAGSGAGAGSGAGAGSGAGAGSGAGAGSGAGAGSGAGAGSGAGAGSGAGAGSGAGAGSGAGAGSGAGAGSGAGAGSGAGAGSGAGAGSGAGAGSGAGAGSGAGAGSGAGAGSGAGAGSGAGAGSGAGAGSGAGAGSGAGAGSGAGAGSGAGAGSGAGAGSGAGAGSGAGAGSGAGAGSGAGAGSGVGVPGVGVPGVGVPGVGVPGVGVPGVGVPGVGVPGVGVPGVGVPGVGVPGVGVPGVGVPGVGVPGVGVPGVGVPGVGVPGVGVPGVGVPGVGVPGVGVPGVGVPGVGVPGVGVPGVGVPGVGVPGVGVPGVGVPGVGVPGVGVPGVGVPGVGVPGVGVPGVGVPGVGVPGVGVPGVGVPGVGVPGVGVPGVGVPGVGVPGVGVPGVGVPGVGVPGVGVPGVGVPGVGVPGVGVPGVGVPGVGVPGVGVPGVGVPGVGVPGVGVPGVGVPGVGVPGVGVPGVGVPGVGVPGVGVPGVGVPGVGVPGVGVPGVGVPGVGVPGVGVPGVGVPGVGVPGVGVPGVGVPGVGVPGVGVPGVGVPGVGVPGVGVPGVGVPGVGVPGVGVPGVGVPGVGVPGVGVPGVGVPGVGVPGVGVPGVGVPGVGVPGVGVPGVGVPGVGVPGVGVPGVGVPGVGVPGVGVPGVGVPGVGVPGVGVPGVGVPGVGVPGVGVPGVGVPGVGVPGXGVPGVGVPGVGVPGVGVPGVGVPGVGVPGVGVPGVGVPGVGVPGVGVPGVGVPGVGVPGVGVPGVGVPGVGVPGVGVPGVGVPGVGVPGVGVPGVGVPGVGVPGVGVPGVGVPGVGVPGVGVPGVGVPGVGVPGVGVPGVGVPGVGVPGVGVPGVGVPGVGVPGVGVPGVGVPGVGVPGVGVPGVGVPGVGVPGVGVPGVGVPGVGVPGVGVPGVGVPGVGVPGVGVPGVGVPGVGVPGVGVPGVGVPGVGVPGVGVPGVGVPGVGVPGVGVPGVGVPGVGVPGVGVPGVGVPGVGVPGVGVPGVGVPGVGVPGVGVPGVGVPGVGVPGVGVPGVGVPGVGVPGVGVPGVGVPGVGVPGVGVPGVGVPGVGVPGVGVPGVGVPGVGVPGVGVPGVGVPGVGVPGVGVPGVGVPGVGVPGVGVPGVGVPGVGVPGVGVPGVGVPGVGVPGVGVPGVGVPGVGVPGVGVPGVGVPGVGVPGVGVPGVGVPGVGVPGVGVPGVGVPGAGAGSGAGAGSGAGAGSGAGAGSGAGAGSGAGAGSGAGAGSGAGAGSGAGAGSGAGAGSGAGAGSGAGAGSGAGAGSGAGAGSGAGAGSGAGAGSGAGAGSGAGAGSGAGAGSGAGAGSGAGAGSGAGAGSGAGAGSGAGAGSGAGAGSGAGAGSGAGAGSGAGAGSGAGAGSGAGAGSGAGAGSGAGAGSGAGAGSGAGAGSGAGAGSGAGAGSGAGAGSGAGAGSGAGAGSGAGAGSGAGAGSGAGAGSGAGAGSGAGAGSGAGAGSGAGAGSGAGAGSGAGAGSGAGAGSGAGAGSGAGAGSGAGAGSGAGAGSGAGAGSGAGAGSGAGAGSGAGAGSGAGAGSGAGAGSGAGAGSGAGAGSGAGAGSGAGAGSGAGAGSGAGAGSGAGAGSGAGAGSGAGAGSGAGAGSGAGAGSGAGAGSGAGAGSGAGAGSGAGAGSGAGAGSGAGAGSGAGAGSGAGAGSGAGAGSGAGAGSGAGAGSGAGAGSGAGAGSGAGAGSGAGAGSGAGAGSGAGAGSGAGAGSGAGAGSGAGAGSGAGAGSGAGAGSGAGAGSGAGAGSGAGAGSGAGAGSGAGAGSGAGAGSGAGAGSGAGAGSGAGAGSGAGAGSGAGAGSGAGAGSGAGAGSGAGAGSGAGAGSGAGAGSGAGAGSGAGAGSGAGAGSGAGAGSGAGAGSGAGAGSGAGAGSGAGAGSGAGAGSGAGAGSGAGAGSGAGAGSGAGAGSGAGAGSGAGAGSGAGAGSGAGAGSGAGAGSGAGAGSGAGAGSGAGAGSGAGAGSGAGAGSGAGAGSGAGAGSGAGAGSGAGAGSGAGAGSGAGAGSGAGAGSGAGAGSGAGAGSGAGAGSGAGAGSGAGAGSGAGAGSGAGAGSGAGAGSGAGAGSGAGAGSGAGAGSGAGAGSGAGAGSGAGAGSGAGAGSGAGAGSGAGAGSGAGAGSGAGAGSGAGAGSGAGAGSGAGAGSGAGAGSGAGAGSGAGAGSGAGAGSGAGAGSGAGAGSGAGAGSGAGAGSGAGAGSGAGAGSGAGAGSGAGAGSGAGAGSGAGAGSGAGAGSGAGAGSGAGAGSGAGAGSGAGAGSGAGAGSGAGAGSGAGAGSGAGAGSGAGAGSGAGAGSGAGAGSGAGAGSGAGAGSGAGAGSGAGAGSGAGAGSGAGAGSGAGAGSGAGAGSGAGAGSGAGAGSGAGAGSGAGAGSGAGAGSGAGAGSGAGAGSGVGVPGVGVPGVGVPGVGVPGVGVPGVGVPGVGVPGVGVPGVGVPGVGVPGVGVPGVGVPGVGVPGVGVPGVGVPGVGVPGVGVPGVGVPGVGVPGVGVPGVGVPGVGVPGVGVPGVGVPGVGVPGVGVPGVGVPGVGVPGVGVPGVGVPGVGVPGVGVPGVGVPGVGVPGVGVPGVGVPGVGVPGVGVPGVGVPGVGVPGVGVPGVGVPGVGVPGVGVPGVGVPGVGVPGVGVPGVGVPGVGVPGVGVPGVGVPGVGVPGVGVPGVGVPGVGVPGVGVPGVGVPGVGVPGVGVPGVGVPGVGVPGVGVPGVGVPGVGVPGVGVPGVGVPGVGVPGVGVPGVGVPGVGVPGVGVPGVGVPGVGVPGVGVPGVGVPGVGVPGVGVPGVGVPGVGVPGVGVPGVGVPGVGVPGVGVPGVGVPGVGVPGVGVPGVGVPGVGVPGVGVPGVGVPGVGVPGVGVPGVGVPGVGVPGVGVPGVGVPGVGVPGVGVPGVGVPGVGVPGXGVPGVGVPGVGVPGVGVPGVGVPGVGVPGVGVPGVGVPGVGVPGVGVPGVGVPGVGVPGVGVPGVGVPGVGVPGVGVPGVGVPGVGVPGVGVPGVGVPGVGVPGVGVPGVGVPGVGVPGVGVPGVGVPGVGVPGVGVPGVGVPGVGVPGVGVPGVGVPGVGVPGVGVPGVGVPGVGVPGVGVPGVGVPGVGVPGVGVPGVGVPGVGVPGVGVPGVGVPGVGVPGVGVPGVGVPGVGVPGVGVPGVGVPGVGVPGVGVPGVGVPGVGVPGVGVPGVGVPGVGVPGVGVPGVGVPGVGVPGVGVPGVGVPGVGVPGVGVPGVGVPGVGVPGVGVPGVGVPGVGVPGVGVPGVGVPGVGVPGVGVPGVGVPGVGVPGVGVPGVGVPGVGVPGVGVPGVGVPGVGVPGVGVPGVGVPGVGVPGVGVPGVGVPGVGVPGVGVPGVGVPGVGVPGVGVPGVGVPGVGVPGVGVPGVGVPGVGVPGVGVPGVGVPGVGVPGVGVPGVGVPGAGAGSGAGAGSGAGAGSGAGAGSGAGAGSGAGAGSGAGAGSGAGAGSGAGAGSGAGAGSGAGAGSGAGAGSGAGAGSGAGAGSGAGAGSGAGAGSGAGAGSGAGAGSGAGAGSGAGAGSGAGAGSGAGAGSGAGAGSGAGAGSGAGAGSGAGAGSGAGAGSGAGAGSGAGAGSGAGAGSGAGAGSGAGAGSGAGAGSGAGAGSGAGAGSGAGAGSGAGAGSGAGAGSGAGAGSGAGAGSGAGAGSGAGAGSGAGAGSGAGAGSGAGAGSGAGAGSGAGAGSGAGAGSGAGAGSGAGAGSGAGAGSGAGAGSGAGAGSGAGAGSGAGAGSGAGAGSGAGAGSGAGAGSGAGAGSGAGAGSGAGAGSGAGAGSGAGAGSGAGAGSGAGAGSGAGAGSGAGAGSGAGAGSGAGAGSGAGAGSGAGAGSGAGAGSGAGAGSGAGAGSGAGAGSGAGAGSGAGAGSGAGAGSGAGAGSGAGAGSGAGAGSGAGAGSGAGAGSGAGAGSGAGAGSGAGAGSGAGAGSGAGAGSGAGAGSGAGAGSGAGAGSGAGAGSGAGAGSGAGAGSGAGAGSGAGAGSGAGAGSGAGAGSGAGAGSGAGAGSGAGAGSGAGAGSGAGAGSGAGAGSGAGAGSGAGAGSGAGAGSGAGAGSGAGAGSGAGAGSGAGAGSGAGAGSGAGAGSGAGAGSGAGAGSGAGAGSGAGAGSGAGAGSGAGAGSGAGAGSGAGAGSGAGAGSGAGAGSGAGAGSGAGAGSGAGAGSGAGAGSGAGAGSGAGAGSGAGAGSGAGAGSGAGAGSGAGAGSGAGAGSGAGAGSGAGAGSGAGAGSGAGAGSGAGAGSGAGAGSGAGAGSGAGAGSGAGAGSGAGAGSGAGAGSGAGAGSGAGAGSGAGAGSGAGAGSGAGAGSGAGAGSGAGAGSGAGAGSGAGAGSGAGAGSGAGAGSGAGAGSGAGAGSGAGAGSGAGAGSGAGAGSGAGAGSGAGAGSGAGAGSGAGAGSGAGAGSGAGAGSGAGAGSGAGAGSGAGAGSGAGAGSGAGAGSGAGAGSGAGAGSGAGAGSGAGAGSGAGAGSGAGAGSGAGAGSGAGAGSGAGAGSGAGAGSGAGAGSGAGAGSGAGAGSGAGAGSGAGAGSGAGAGSGAGAGSGAGAGSGAGAGSGAGAGSGAGAGSGAGAGSGAGAGSGAGAGSGAGAGSGAGAGSGAGAGSGAGAGSGAGAGSGVGVPGVGVPGVGVPGVGVPGVGVPGVGVPGVGVPGVGVPGVGVPGVGVPGVGVPGVGVPGVGVPGVGVPGVGVPGVGVPGVGVPGVGVPGVGVPGVGVPGVGVPGVGVPGVGVPGVGVPGVGVPGVGVPGVGVPGVGVPGVGVPGVGVPGVGVPGVGVPGVGVPGVGVPGVGVPGVGVPGVGVPGVGVPGVGVPGVGVPGVGVPGVGVPGVGVPGVGVPGVGVPGVGVPGVGVPGVGVPGVGVPGVGVPGVGVPGVGVPGVGVPGVGVPGVGVPGVGVPGVGVPGVGVPGVGVPGVGVPGVGVPGVGVPGVGVPGVGVPGVGVPGVGVPGVGVPGVGVPGVGVPGVGVPGVGVPGVGVPGVGVPGVGVPGVGVPGVGVPGVGVPGVGVPGVGVPGVGVPGVGVPGVGVPGVGVPGVGVPGVGVPGVGVPGVGVPGVGVPGVGVPGVGVPGVGVPGVGVPGVGVPGVGVPGVGVPGVGVPGVGVPGVGVPGVGVPGVGVPGXGVPGVGVPGVGVPGVGVPGVGVPGVGVPGVGVPGVGVPGVGVPGVGVPGVGVPGVGVPGVGVPGVGVPGVGVPGVGVPGVGVPGVGVPGVGVPGVGVPGVGVPGVGVPGVGVPGVGVPGVGVPGVGVPGVGVPGVGVPGVGVPGVGVPGVGVPGVGVPGVGVPGVGVPGVGVPGVGVPGVGVPGVGVPGVGVPGVGVPGVGVPGVGVPGVGVPGVGVPGVGVPGVGVPGVGVPGVGVPGVGVPGVGVPGVGVPGVGVPGVGVPGVGVPGVGVPGVGVPGVGVPGVGVPGVGVPGVGVPGVGVPGVGVPGVGVPGVGVPGVGVPGVGVPGVGVPGVGVPGVGVPGVGVPGVGVPGVGVPGVGVPGVGVPGVGVPGVGVPGVGVPGVGVPGVGVPGVGVPGVGVPGVGVPGVGVPGVGVPGVGVPGVGVPGVGVPGVGVPGVGVPGVGVPGVGVPGVGVPGVGVPGVGVPGVGVPGVGVPGVGVPGVGVPGVGVPGVGVPGVGVPGAGAGSGAGAGSGAGAGSGAGAGSGAGAGSGAGAGSGAGAGSGAGAGSGAGAGSGAGAGSGAGAGSGAGAGSGAGAGSGAGAGSGAGAGSGAGAGSGAGAGSGAGAGSGAGAGSGAGAGSGAGAGSGAGAGSGAGAGSGAGAGSGAGAGSGAGAGSGAGAGSGAGAGSGAGAGSGAGAGSGAGAGSGAGAGSGAGAGSGAGAGSGAGAGSGAGAGSGAGAGSGAGAGSGAGAGSGAGAGSGAGAGSGAGAGSGAGAGSGAGAGSGAGAGSGAGAGSGAGAGSGAGAGSGAGAGSGAGAGSGAGAGSGAGAGSGAGAGSGAGAGSGAGAGSGAGAGSGAGAGSGAGAGSGAGAGSGAGAGSGAGAGSGAGAGSGAGAGSGAGAGSGAGAGSGAGAGSGAGAGSGAGAGSGAGAGSGAGAGSGAGAGSGAGAGSGAGAGSGAGAGSGAGAGSGAGAGSGAGAGSGAGAGSGAGAGSGAGAGSGAGAGSGAGAGSGAGAGSGAGAGSGAGAGSGAGAGSGAGAGSGAGAGSGAGAGSGAGAGSGAGAGSGAGAGSGAGAGSGAGAGSGAGAGSGAGAGSGAGAGSGAGAGSGAGAGSGAGAGSGAGAGSGAGAGSGAGAGSGAGAGSGAGAGSGAGAGSGAGAGSGAGAGSGAGAGSGAGAGSGAGAGSGAGAGSGAGAGSGAGAGSGAGAGSGAGAGSGAGAGSGAGAGSGAGAGSGAGAGSGAGAGSGAGAGSGAGAGSGAGAGSGAGAGSGAGAGSGAGAGSGAGAGSGAGAGSGAGAGSGAGAGSGAGAGSGAGAGSGAGAGSGAGAGSGAGAGSGAGAGSGAGAGSGAGAGSGAGAGSGAGAGSGAGAGSGAGAGSGAGAGSGAGAGSGAGAGSGAGAGSGAGAGSGAGAGSGAGAGSGAGAGSGAGAGSGAGAGSGAGAGSGAGAGSGAGAGSGAGAGSGAGAGSGAGAGSGAGAGSGAGAGSGAGAGSGAGAGSGAGAGSGAGAGSGAGAGSGAGAGSGAGAGSGAGAGSGAGAGSGAGAGSGAGAGSGAGAGSGAGAGSGAGAGSGAGAGSGAGAGSGAGAGSGAGAGSGAGAGSGAGAGSGAGAGSGAGAGSGAGAGSGAGAGSGAGAGSGAGAGSGAGAGSGAGAGSGAGAGSGAGAGSGAGAGSGAGAGSGAGAGSGAGAGSGAGAGSGAGAGSGAGAGSGAGAGSGAGAGSGAGAGSGVGVPGVGVPGVGVPGVGVPGVGVPGVGVPGVGVPGVGVPGVGVPGVGVPGVGVPGVGVPGVGVPGVGVPGVGVPGVGVPGVGVPGVGVPGVGVPGVGVPGVGVPGVGVPGVGVPGVGVPGVGVPGVGVPGVGVPGVGVPGVGVPGVGVPGVGVPGVGVPGVGVPGVGVPGVGVPGVGVPGVGVPGVGVPGVGVPGVGVPGVGVPGVGVPGVGVPGVGVPGVGVPGVGVPGVGVPGVGVPGVGVPGVGVPGVGVPGVGVPGVGVPGVGVPGVGVPGVGVPGVGVPGVGVPGVGVPGVGVPGVGVPGVGVPGVGVPGVGVPGVGVPGVGVPGVGVPGVGVPGVGVPGVGVPGVGVPGVGVPGVGVPGVGVPGVGVPGVGVPGVGVPGVGVPGVGVPGVGVPGVGVPGVGVPGVGVPGVGVPGVGVPGVGVPGVGVPGVGVPGVGVPGVGVPGVGVPGVGVPGVGVPGVGVPGVGVPGVGVPGVGVPGVGVPGVGVPGVGVPGXGVPGVGVPGVGVPGVGVPGVGVPGVGVPGVGVPGVGVPGVGVPGVGVPGVGVPGVGVPGVGVPGVGVPGVGVPGVGVPGVGVPGVGVPGVGVPGVGVPGVGVPGVGVPGVGVPGVGVPGVGVPGVGVPGVGVPGVGVPGVGVPGVGVPGVGVPGVGVPGVGVPGVGVPGVGVPGVGVPGVGVPGVGVPGVGVPGVGVPGVGVPGVGVPGVGVPGVGVPGVGVPGVGVPGVGVPGVGVPGVGVPGVGVPGVGVPGVGVPGVGVPGVGVPGVGVPGVGVPGVGVPGVGVPGVGVPGVGVPGVGVPGVGVPGVGVPGVGVPGVGVPGVGVPGVGVPGVGVPGVGVPGVGVPGVGVPGVGVPGVGVPGVGVPGVGVPGVGVPGVGVPGVGVPGVGVPGVGVPGVGVPGVGVPGVGVPGVGVPGVGVPGVGVPGVGVPGVGVPGVGVPGVGVPGVGVPGVGVPGVGVPGVGVPGVGVPGVGVPGVGVPGVGVPGVGVPGVGVPGVGVPGAGAGSGAGAGSGAGAGSGAGAGSGAGAGSGAGAGSGAGAGSGAGAGSGAGAGSGAGAGSGAGAGSGAGAGSGAGAGSGAGAGSGAGAGSGAGAGSGAGAGSGAGAGSGAGAGSGAGAGSGAGAGSGAGAGSGAGAGSGAGAGSGAGAGSGAGAGSGAGAGSGAGAGSGAGAGSGAGAGSGAGAGSGAGAGSGAGAGSGAGAGSGAGAGSGAGAGSGAGAGSGAGAGSGAGAGSGAGAGSGAGAGSGAGAGSGAGAGSGAGAGSGAGAGSGAGAGSGAGAGSGAGAGSGAGAGSGAGAGSGAGAGSGAGAGSGAGAGSGAGAGSGAGAGSGAGAGSGAGAGSGAGAGSGAGAGSGAGAGSGAGAGSGAGAGSGAGAGSGAGAGSGAGAGSGAGAGSGAGAGSGAGAGSGAGAGSGAGAGSGAGAGSGAGAGSGAGAGSGAGAGSGAGAGSGAGAGSGAGAGSGAGAGSGAGAGSGAGAGSGAGAGSGAGAGSGAGAGSGAGAGSGAGAGSGAGAGSGAGAGSGAGAGSGAGAGSGAGAGSGAGAGSGAGAGSGAGAGSGAGAGSGAGAGSGAGAGSGAGAGSGAGAGSGAGAGSGAGAGSGAGAGSGAGAGSGAGAGSGAGAGSGAGAGSGAGAGSGAGAGSGAGAGSGAGAGSGAGAGSGAGAGSGAGAGSGAGAGSGAGAGSGAGAGSGAGAGSGAGAGSGAGAGSGAGAGSGAGAGSGAGAGSGAGAGSGAGAGSGAGAGSGAGAGSGAGAGSGAGAGSGAGAGSGAGAGSGAGAGSGAGAGSGAGAGSGAGAGSGAGAGSGAGAGSGAGAGSGAGAGSGAGAGSGAGAGSGAGAGSGAGAGSGAGAGSGAGAGSGAGAGSGAGAGSGAGAGSGAGAGSGAGAGSGAGAGSGAGAGSGAGAGSGAGAGSGAGAGSGAGAGSGAGAGSGAGAGSGAGAGSGAGAGSGAGAGSGAGAGSGAGAGSGAGAGSGAGAGSGAGAGSGAGAGSGAGAGSGAGAGSGAGAGSGAGAGSGAGAGSGAGAGSGAGAGSGAGAGSGAGAGSGAGAGSGAGAGSGAGAGSGAGAGSGAGAGSGAGAGSGAGAGSGAGAGSGAGAGSGAGAGSGAGAGSGAGAGSGAGAGSGAGAGSGAGAGSGAGAGSGAGAGSGAGAGSGAGAGSGAGAGSGAGAGSGAGAGSGAGAGSGAGAGSGAGAGSGAGAGSGAGAGSGVGVPGVGVPGVGVPGVGVPGVGVPGVGVPGVGVPGVGVPGVGVPGVGVPGVGVPGVGVPGVGVPGVGVPGVGVPGVGVPGVGVPGVGVPGVGVPGVGVPGVGVPGVGVPGVGVPGVGVPGVGVPGVGVPGVGVPGVGVPGVGVPGVGVPGVGVPGVGVPGVGVPGVGVPGVGVPGVGVPGVGVPGVGVPGVGVPGVGVPGVGVPGVGVPGVGVPGVGVPGVGVPGVGVPGVGVPGVGVPGVGVPGVGVPGVGVPGVGVPGVGVPGVGVPGVGVPGVGVPGVGVPGVGVPGVGVPGVGVPGVGVPGVGVPGVGVPGVGVPGVGVPGVGVPGVGVPGVGVPGVGVPGVGVPGVGVPGVGVPGVGVPGVGVPGVGVPGVGVPGVGVPGVGVPGVGVPGVGVPGVGVPGVGVPGVGVPGVGVPGVGVPGVGVPGVGVPGVGVPGVGVPGVGVPGVGVPGVGVPGVGVPGVGVPGVGVPGVGVPGVGVPGVGVPGVGVPGVGVPGXGVPGVGVPGVGVPGVGVPGVGVPGVGVPGVGVPGVGVPGVGVPGVGVPGVGVPGVGVPGVGVPGVGVPGVGVPGVGVPGVGVPGVGVPGVGVPGVGVPGVGVPGVGVPGVGVPGVGVPGVGVPGVGVPGVGVPGVGVPGVGVPGVGVPGVGVPGVGVPGVGVPGVGVPGVGVPGVGVPGVGVPGVGVPGVGVPGVGVPGVGVPGVGVPGVGVPGVGVPGVGVPGVGVPGVGVPGVGVPGVGVPGVGVPGVGVPGVGVPGVGVPGVGVPGVGVPGVGVPGVGVPGVGVPGVGVPGVGVPGVGVPGVGVPGVGVPGVGVPGVGVPGVGVPGVGVPGVGVPGVGVPGVGVPGVGVPGVGVPGVGVPGVGVPGVGVPGVGVPGVGVPGVGVPGVGVPGVGVPGVGVPGVGVPGVGVPGVGVPGVGVPGVGVPGVGVPGVGVPGVGVPGVGVPGVGVPGVGVPGVGVPGVGVPGVGVPGVGVPGVGVPGVGVPGVGVPGVGVPGVGVPGAGAGSGAGAGSGAGAGSGAGAGSGAGAGSGAGAGSGAGAGSGAGAGSGAGAGSGAGAGSGAGAGSGAGAGSGAGAGSGAGAGSGAGAGSGAGAGSGAGAGSGAGAGSGAGAGSGAGAGSGAGAGSGAGAGSGAGAGSGAGAGSGAGAGSGAGAGSGAGAGSGAGAGSGAGAGSGAGAGSGAGAGSGAGAGSGAGAGSGAGAGSGAGAGSGAGAGSGAGAGSGAGAGSGAGAGSGAGAGSGAGAGSGAGAGSGAGAGSGAGAGSGAGAGSGAGAGSGAGAGSGAGAGSGAGAGSGAGAGSGAGAGSGAGAGSGAGAGSGAGAGSGAGAGSGAGAGSGAGAGSGAGAGSGAGAGSGAGAGSGAGAGSGAGAGSGAGAGSGAGAGSGAGAGSGAGAGSGAGAGSGAGAGSGAGAGSGAGAGSGAGAGSGAGAGSGAGAGSGAGAGSGAGAGSGAGAGSGAGAGSGAGAGSGAGAGSGAGAGSGAGAGSGAGAGSGAGAGSGAGAGSGAGAGSGAGAGSGAGAGSGAGAGSGAGAGSGAGAGSGAGAGSGAGAGSGAGAGSGAGAGSGAGAGSGAGAGSGAGAGSGAGAGSGAGAGSGAGAGSGAGAGSGAGAGSGAGAGSGAGAGSGAGAGSGAGAGSGAGAGSGAGAGSGAGAGSGAGAGSGAGAGSGAGAGSGAGAGSGAGAGSGAGAGSGAGAGSGAGAGSGAGAGSGAGAGSGAGAGSGAGAGSGAGAGSGAGAGSGAGAGSGAGAGSGAGAGSGAGAGSGAGAGSGAGAGSGAGAGSGAGAGSGAGAGSGAGAGSGAGAGSGAGAGSGAGAGSGAGAGSGAGAGSGAGAGSGAGAGSGAGAGSGAGAGSGAGAGSGAGAGSGAGAGSGAGAGSGAGAGSGAGAGSGAGAGSGAGAGSGAGAGSGAGAGSGAGAGSGAGAGSGAGAGSGAGAGSGAGAGSGAGAGSGAGAGSGAGAGSGAGAGSGAGAGSGAGAGSGAGAGSGAGAGSGAGAGSGAGAGSGAGAGSGAGAGSGAGAGSGAGAGSGAGAGSGAGAGSGAGAGSGAGAGSGAGAGSGAGAGSGAGAGSGAGAGSGAGAGSGAGAGSGAGAGSGAGAGSGAGAGSGAGAGSGAGAGSGAGAGSGAGAGSGAGAGSGAGAGSGAGAGSGAGAGSGAGAGSGAGAGSGAGAGSGAGAGSGAGAGSGAGAGSGAGAGSGAGAGSGAGAGSGVGVPGVGVPGVGVPGVGVPGVGVPGVGVPGVGVPGVGVPGVGVPGVGVPGVGVPGVGVPGVGVPGVGVPGVGVPGVGVPGVGVPGVGVPGVGVPGVGVPGVGVPGVGVPGVGVPGVGVPGVGVPGVGVPGVGVPGVGVPGVGVPGVGVPGVGVPGVGVPGVGVPGVGVPGVGVPGVGVPGVGVPGVGVPGVGVPGVGVPGVGVPGVGVPGVGVPGVGVPGVGVPGVGVPGVGVPGVGVPGVGVPGVGVPGVGVPGVGVPGVGVPGVGVPGVGVPGVGVPGVGVPGVGVPGVGVPGVGVPGVGVPGVGVPGVGVPGVGVPGVGVPGVGVPGVGVPGVGVPGVGVPGVGVPGVGVPGVGVPGVGVPGVGVPGVGVPGVGVPGVGVPGVGVPGVGVPGVGVPGVGVPGVGVPGVGVPGVGVPGVGVPGVGVPGVGVPGVGVPGVGVPGVGVPGVGVPGVGVPGVGVPGVGVPGVGVPGVGVPGVGVPGVGVPGVGVPGVGVPGXGVPGVGVPGVGVPGVGVPGVGVPGVGVPGVGVPGVGVPGVGVPGVGVPGVGVPGVGVPGVGVPGVGVPGVGVPGVGVPGVGVPGVGVPGVGVPGVGVPGVGVPGVGVPGVGVPGVGVPGVGVPGVGVPGVGVPGVGVPGVGVPGVGVPGVGVPGVGVPGVGVPGVGVPGVGVPGVGVPGVGVPGVGVPGVGVPGVGVPGVGVPGVGVPGVGVPGVGVPGVGVPGVGVPGVGVPGVGVPGVGVPGVGVPGVGVPGVGVPGVGVPGVGVPGVGVPGVGVPGVGVPGVGVPGVGVPGVGVPGVGVPGVGVPGVGVPGVGVPGVGVPGVGVPGVGVPGVGVPGVGVPGVGVPGVGVPGVGVPGVGVPGVGVPGVGVPGVGVPGVGVPGVGVPGVGVPGVGVPGVGVPGVGVPGVGVPGVGVPGVGVPGVGVPGVGVPGVGVPGVGVPGVGVPGVGVPGVGVPGVGVPGVGVPGVGVPGVGVPGVGVPGVGVPGVGVPGVGVPGVGVPGAGAGSGAGAGSGAGAGSGAGAGSGAGAGSGAGAGSGAGAGSGAGAGSGAGAGSGAGAGSGAGAGSGAGAGSGAGAGSGAGAGSGAGAGSGAGAGSGAGAGSGAGAGSGAGAGSGAGAGSGAGAGSGAGAGSGAGAGSGAGAGSGAGAGSGAGAGSGAGAGSGAGAGSGAGAGSGAGAGSGAGAGSGAGAGSGAGAGSGAGAGSGAGAGSGAGAGSGAGAGSGAGAGSGAGAGSGAGAGSGAGAGSGAGAGSGAGAGSGAGAGSGAGAGSGAGAGSGAGAGSGAGAGSGAGAGSGAGAGSGAGAGSGAGAGSGAGAGSGAGAGSGAGAGSGAGAGSGAGAGSGAGAGSGAGAGSGAGAGSGAGAGSGAGAGSGAGAGSGAGAGSGAGAGSGAGAGSGAGAGSGAGAGSGAGAGSGAGAGSGAGAGSGAGAGSGAGAGSGAGAGSGAGAGSGAGAGSGAGAGSGAGAGSGAGAGSGAGAGSGAGAGSGAGAGSGAGAGSGAGAGSGAGAGSGAGAGSGAGAGSGAGAGSGAGAGSGAGAGSGAGAGSGAGAGSGAGAGSGAGAGSGAGAGSGAGAGSGAGAGSGAGAGSGAGAGSGAGAGSGAGAGSGAGAGSGAGAGSGAGAGSGAGAGSGAGAGSGAGAGSGAGAGSGAGAGSGAGAGSGAGAGSGAGAGSGAGAGSGAGAGSGAGAGSGAGAGSGAGAGSGAGAGSGAGAGSGAGAGSGAGAGSGAGAGSGAGAGSGAGAGSGAGAGSGAGAGSGAGAGSGAGAGSGAGAGSGAGAGSGAGAGSGAGAGSGAGAGSGAGAGSGAGAGSGAGAGSGAGAGSGAGAGSGAGAGSGAGAGSGAGAGSGAGAGSGAGAGSGAGAGSGAGAGSGAGAGSGAGAGSGAGAGSGAGAGSGAGAGSGAGAGSGAGAGSGAGAGSGAGAGSGAGAGSGAGAGSGAGAGSGAGAGSGAGAGSGAGAGSGAGAGSGAGAGSGAGAGSGAGAGSGAGAGSGAGAGSGAGAGSGAGAGSGAGAGSGAGAGSGAGAGSGAGAGSGAGAGSGAGAGSGAGAGSGAGAGSGAGAGSGAGAGSGAGAGSGAGAGSGAGAGSGAGAGSGAGAGSGAGAGSGAGAGSGAGAGSGAGAGSGAGAGSGAGAGSGAGAGSGAGAGSGAGAGSGAGAGSGAGAGSGAGAGSGAGAGSGAGAGSGAGAGSGAGAGSGAGAGSGAGAGSGVGVPGVGVPGVGVPGVGVPGVGVPGVGVPGVGVPGVGVPGVGVPGVGVPGVGVPGVGVPGVGVPGVGVPGVGVPGVGVPGVGVPGVGVPGVGVPGVGVPGVGVPGVGVPGVGVPGVGVPGVGVPGVGVPGVGVPGVGVPGVGVPGVGVPGVGVPGVGVPGVGVPGVGVPGVGVPGVGVPGVGVPGVGVPGVGVPGVGVPGVGVPGVGVPGVGVPGVGVPGVGVPGVGVPGVGVPGVGVPGVGVPGVGVPGVGVPGVGVPGVGVPGVGVPGVGVPGVGVPGVGVPGVGVPGVGVPGVGVPGVGVPGVGVPGVGVPGVGVPGVGVPGVGVPGVGVPGVGVPGVGVPGVGVPGVGVPGVGVPGVGVPGVGVPGVGVPGVGVPGVGVPGVGVPGVGVPGVGVPGVGVPGVGVPGVGVPGVGVPGVGVPGVGVPGVGVPGVGVPGVGVPGVGVPGVGVPGVGVPGVGVPGVGVPGVGVPGVGVPGVGVPGVGVPGVGVPGVGVPGXGVPGVGVPGVGVPGVGVPGVGVPGVGVPGVGVPGVGVPGVGVPGVGVPGVGVPGVGVPGVGVPGVGVPGVGVPGVGVPGVGVPGVGVPGVGVPGVGVPGVGVPGVGVPGVGVPGVGVPGVGVPGVGVPGVGVPGVGVPGVGVPGVGVPGVGVPGVGVPGVGVPGVGVPGVGVPGVGVPGVGVPGVGVPGVGVPGVGVPGVGVPGVGVPGVGVPGVGVPGVGVPGVGVPGVGVPGVGVPGVGVPGVGVPGVGVPGVGVPGVGVPGVGVPGVGVPGVGVPGVGVPGVGVPGVGVPGVGVPGVGVPGVGVPGVGVPGVGVPGVGVPGVGVPGVGVPGVGVPGVGVPGVGVPGVGVPGVGVPGVGVPGVGVPGVGVPGVGVPGVGVPGVGVPGVGVPGVGVPGVGVPGVGVPGVGVPGVGVPGVGVPGVGVPGVGVPGVGVPGVGVPGVGVPGVGVPGVGVPGVGVPGVGVPGVGVPGVGVPGVGVPGVGVPGVGVPGVGVPGVGVPGAGAGSGAGAGSGAGAGSGAGAGSGAGAGSGAGAGSGAGAGSGAGAGSGAGAGSGAGAGSGAGAGSGAGAGSGAGAGSGAGAGSGAGAGSGAGAGSGAGAGSGAGAGSGAGAGSGAGAGSGAGAGSGAGAGSGAGAGSGAGAGSGAGAGSGAGAGSGAGAGSGAGAGSGAGAGSGAGAGSGAGAGSGAGAGSGAGAGSGAGAGSGAGAGSGAGAGSGAGAGSGAGAGSGAGAGSGAGAGSGAGAGSGAGAGSGAGAGSGAGAGSGAGAGSGAGAGSGAGAGSGAGAGSGAGAGSGAGAGSGAGAGSGAGAGSGAGAGSGAGAGSGAGAGSGAGAGSGAGAGSGAGAGSGAGAGSGAGAGSGAGAGSGAGAGSGAGAGSGAGAGSGAGAGSGAGAGSGAGAGSGAGAGSGAGAGSGAGAGSGAGAGSGAGAGSGAGAGSGAGAGSGAGAGSGAGAGSGAGAGSGAGAGSGAGAGSGAGAGSGAGAGSGAGAGSGAGAGSGAGAGSGAGAGSGAGAGSGAGAGSGAGAGSGAGAGSGAGAGSGAGAGSGAGAGSGAGAGSGAGAGSGAGAGSGAGAGSGAGAGSGAGAGSGAGAGSGAGAGSGAGAGSGAGAGSGAGAGSGAGAGSGAGAGSGAGAGSGAGAGSGAGAGSGAGAGSGAGAGSGAGAGSGAGAGSGAGAGSGAGAGSGAGAGSGAGAGSGAGAGSGAGAGSGAGAGSGAGAGSGAGAGSGAGAGSGAGAGSGAGAGSGAGAGSGAGAGSGAGAGSGAGAGSGAGAGSGAGAGSGAGAGSGAGAGSGAGAGSGAGAGSGAGAGSGAGAGSGAGAGSGAGAGSGAGAGSGAGAGSGAGAGSGAGAGSGAGAGSGAGAGSGAGAGSGAGAGSGAGAGSGAGAGSGAGAGSGAGAGSGAGAGSGAGAGSGAGAGSGAGAGSGAGAGSGAGAGSGAGAGSGAGAGSGAGAGSGAGAGSGAGAGSGAGAGSGAGAGSGAGAGSGAGAGSGAGAGSGAGAGSGAGAGSGAGAGSGAGAGSGAGAGSGAGAGSGAGAGSGAGAGSGAGAGSGAGAGSGAGAGSGAGAGSGAGAGSGAGAGSGAGAGSGAGAGSGAGAGSGAGAGSGAGAGSGAGAGSGAGAGSGAGAGSGAGAGSGAGAGSGAGAGSGAGAGSGAGAGSGAGAGSGAGAGSGAGAGSGAGAGSGAGAGSGAGAGSGAGAGSGAGAGSGVGVPGVGVPGVGVPGVGVPGVGVPGVGVPGVGVPGVGVPGVGVPGVGVPGVGVPGVGVPGVGVPGVGVPGVGVPGVGVPGVGVPGVGVPGVGVPGVGVPGVGVPGVGVPGVGVPGVGVPGVGVPGVGVPGVGVPGVGVPGVGVPGVGVPGVGVPGVGVPGVGVPGVGVPGVGVPGVGVPGVGVPGVGVPGVGVPGVGVPGVGVPGVGVPGVGVPGVGVPGVGVPGVGVPGVGVPGVGVPGVGVPGVGVPGVGVPGVGVPGVGVPGVGVPGVGVPGVGVPGVGVPGVGVPGVGVPGVGVPGVGVPGVGVPGVGVPGVGVPGVGVPGVGVPGVGVPGVGVPGVGVPGVGVPGVGVPGVGVPGVGVPGVGVPGVGVPGVGVPGVGVPGVGVPGVGVPGVGVPGVGVPGVGVPGVGVPGVGVPGVGVPGVGVPGVGVPGVGVPGVGVPGVGVPGVGVPGVGVPGVGVPGVGVPGVGVPGVGVPGVGVPGVGVPGVGVPGVGVPGXGVPGVGVPGVGVPGVGVPGVGVPGVGVPGVGVPGVGVPGVGVPGVGVPGVGVPGVGVPGVGVPGVGVPGVGVPGVGVPGVGVPGVGVPGVGVPGVGVPGVGVPGVGVPGVGVPGVGVPGVGVPGVGVPGVGVPGVGVPGVGVPGVGVPGVGVPGVGVPGVGVPGVGVPGVGVPGVGVPGVGVPGVGVPGVGVPGVGVPGVGVPGVGVPGVGVPGVGVPGVGVPGVGVPGVGVPGVGVPGVGVPGVGVPGVGVPGVGVPGVGVPGVGVPGVGVPGVGVPGVGVPGVGVPGVGVPGVGVPGVGVPGVGVPGVGVPGVGVPGVGVPGVGVPGVGVPGVGVPGVGVPGVGVPGVGVPGVGVPGVGVPGVGVPGVGVPGVGVPGVGVPGVGVPGVGVPGVGVPGVGVPGVGVPGVGVPGVGVPGVGVPGVGVPGVGVPGVGVPGVGVPGVGVPGVGVPGVGVPGVGVPGVGVPGVGVPGVGVPGVGVPGVGVPGVGVPGVGVPGVGVPGAGAGSGAGAGSGAGAGSGAGAGSGAGAGSGAGAGSGAGAGSGAGAGSGAGAGSGAGAGSGAGAGSGAGAGSGAGAGSGAGAGSGAGAGSGAGAGSGAGAGSGAGAGSGAGAGSGAGAGSGAGAGSGAGAGSGAGAGSGAGAGSGAGAGSGAGAGSGAGAGSGAGAGSGAGAGSGAGAGSGAGAGSGAGAGSGAGAGSGAGAGSGAGAGSGAGAGSGAGAGSGAGAGSGAGAGSGAGAGSGAGAGSGAGAGSGAGAGSGAGAGSGAGAGSGAGAGSGAGAGSGAGAGSGAGAGSGAGAGSGAGAGSGAGAGSGAGAGSGAGAGSGAGAGSGAGAGSGAGAGSGAGAGSGAGAGSGAGAGSGAGAGSGAGAGSGAGAGSGAGAGSGAGAGSGAGAGSGAGAGSGAGAGSGAGAGSGAGAGSGAGAGSGAGAGSGAGAGSGAGAGSGAGAGSGAGAGSGAGAGSGAGAGSGAGAGSGAGAGSGAGAGSGAGAGSGAGAGSGAGAGSGAGAGSGAGAGSGAGAGSGAGAGSGAGAGSGAGAGSGAGAGSGAGAGSGAGAGSGAGAGSGAGAGSGAGAGSGAGAGSGAGAGSGAGAGSGAGAGSGAGAGSGAGAGSGAGAGSGAGAGSGAGAGSGAGAGSGAGAGSGAGAGSGAGAGSGAGAGSGAGAGSGAGAGSGAGAGSGAGAGSGAGAGSGAGAGSGAGAGSGAGAGSGAGAGSGAGAGSGAGAGSGAGAGSGAGAGSGAGAGSGAGAGSGAGAGSGAGAGSGAGAGSGAGAGSGAGAGSGAGAGSGAGAGSGAGAGSGAGAGSGAGAGSGAGAGSGAGAGSGAGAGSGAGAGSGAGAGSGAGAGSGAGAGSGAGAGSGAGAGSGAGAGSGAGAGSGAGAGSGAGAGSGAGAGSGAGAGSGAGAGSGAGAGSGAGAGSGAGAGSGAGAGSGAGAGSGAGAGSGAGAGSGAGAGSGAGAGSGAGAGSGAGAGSGAGAGSGAGAGSGAGAGSGAGAGSGAGAGSGAGAGSGAGAGSGAGAGSGAGAGSGAGAGSGAGAGSGAGAGSGAGAGSGAGAGSGAGAGSGAGAGSGAGAGSGAGAGSGAGAGSGAGAGSGAGAGSGAGAGSGAGAGSGAGAGSGAGAGSGAGAGSGAGAGSGAGAGSGAGAGSGAGAGSGAGAGSGAGAGSGAGAGSGAGAGSGAGAGSGAGAGSGAGAGSGAGAGSGAGAGSGVGVPGVGVPGVGVPGVGVPGVGVPGVGVPGVGVPGVGVPGVGVPGVGVPGVGVPGVGVPGVGVPGVGVPGVGVPGVGVPGVGVPGVGVPGVGVPGVGVPGVGVPGVGVPGVGVPGVGVPGVGVPGVGVPGVGVPGVGVPGVGVPGVGVPGVGVPGVGVPGVGVPGVGVPGVGVPGVGVPGVGVPGVGVPGVGVPGVGVPGVGVPGVGVPGVGVPGVGVPGVGVPGVGVPGVGVPGVGVPGVGVPGVGVPGVGVPGVGVPGVGVPGVGVPGVGVPGVGVPGVGVPGVGVPGVGVPGVGVPGVGVPGVGVPGVGVPGVGVPGVGVPGVGVPGVGVPGVGVPGVGVPGVGVPGVGVPGVGVPGVGVPGVGVPGVGVPGVGVPGVGVPGVGVPGVGVPGVGVPGVGVPGVGVPGVGVPGVGVPGVGVPGVGVPGVGVPGVGVPGVGVPGVGVPGVGVPGVGVPGVGVPGVGVPGVGVPGVGVPGVGVPGVGVPGVGVPGVGVPGXGVPGVGVPGVGVPGVGVPGVGVPGVGVPGVGVPGVGVPGVGVPGVGVPGVGVPGVGVPGVGVPGVGVPGVGVPGVGVPGVGVPGVGVPGVGVPGVGVPGVGVPGVGVPGVGVPGVGVPGVGVPGVGVPGVGVPGVGVPGVGVPGVGVPGVGVPGVGVPGVGVPGVGVPGVGVPGVGVPGVGVPGVGVPGVGVPGVGVPGVGVPGVGVPGVGVPGVGVPGVGVPGVGVPGVGVPGVGVPGVGVPGVGVPGVGVPGVGVPGVGVPGVGVPGVGVPGVGVPGVGVPGVGVPGVGVPGVGVPGVGVPGVGVPGVGVPGVGVPGVGVPGVGVPGVGVPGVGVPGVGVPGVGVPGVGVPGVGVPGVGVPGVGVPGVGVPGVGVPGVGVPGVGVPGVGVPGVGVPGVGVPGVGVPGVGVPGVGVPGVGVPGVGVPGVGVPGVGVPGVGVPGVGVPGVGVPGVGVPGVGVPGVGVPGVGVPGVGVPGVGVPGVGVPGVGVPGVGVPGVGVPGAGAGSGAGAGSGAGAGSGAGAGSGAGAGSGAGAGSGAGAGSGAGAGSGAGAGSGAGAGSGAGAGSGAGAGSGAGAGSGAGAGSGAGAGSGAGAGSGAGAGSGAGAGSGAGAGSGAGAGSGAGAGSGAGAGSGAGAGSGAGAGSGAGAGSGAGAGSGAGAGSGAGAGSGAGAGSGAGAGSGAGAGSGAGAGSGAGAGSGAGAGSGAGAGSGAGAGSGAGAGSGAGAGSGAGAGSGAGAGSGAGAGSGAGAGSGAGAGSGAGAGSGAGAGSGAGAGSGAGAGSGAGAGSGAGAGSGAGAGSGAGAGSGAGAGSGAGAGSGAGAGSGAGAGSGAGAGSGAGAGSGAGAGSGAGAGSGAGAGSGAGAGSGAGAGSGAGAGSGAGAGSGAGAGSGAGAGSGAGAGSGAGAGSGAGAGSGAGAGSGAGAGSGAGAGSGAGAGSGAGAGSGAGAGSGAGAGSGAGAGSGAGAGSGAGAGSGAGAGSGAGAGSGAGAGSGAGAGSGAGAGSGAGAGSGAGAGSGAGAGSGAGAGSGAGAGSGAGAGSGAGAGSGAGAGSGAGAGSGAGAGSGAGAGSGAGAGSGAGAGSGAGAGSGAGAGSGAGAGSGAGAGSGAGAGSGAGAGSGAGAGSGAGAGSGAGAGSGAGAGSGAGAGSGAGAGSGAGAGSGAGAGSGAGAGSGAGAGSGAGAGSGAGAGSGAGAGSGAGAGSGAGAGSGAGAGSGAGAGSGAGAGSGAGAGSGAGAGSGAGAGSGAGAGSGAGAGSGAGAGSGAGAGSGAGAGSGAGAGSGAGAGSGAGAGSGAGAGSGAGAGSGAGAGSGAGAGSGAGAGSGAGAGSGAGAGSGAGAGSGAGAGSGAGAGSGAGAGSGAGAGSGAGAGSGAGAGSGAGAGSGAGAGSGAGAGSGAGAGSGAGAGSGAGAGSGAGAGSGAGAGSGAGAGSGAGAGSGAGAGSGAGAGSGAGAGSGAGAGSGAGAGSGAGAGSGAGAGSGAGAGSGAGAGSGAGAGSGAGAGSGAGAGSGAGAGSGAGAGSGAGAGSGAGAGSGAGAGSGAGAGSGAGAGSGAGAGSGAGAGSGAGAGSGAGAGSGAGAGSGAGAGSGAGAGSGAGAGSGAGAGSGAGAGSGAGAGSGAGAGSGAGAGSGAGAGSGAGAGSGAGAGSGAGAGSGAGAGSGAGAGSGAGAGSGAGAGSGAGAGSGAGAGSGAGAGSGAGAGSGAGAGSGVGVPGVGVPGVGVPGVGVPGVGVPGVGVPGVGVPGVGVPGVGVPGVGVPGVGVPGVGVPGVGVPGVGVPGVGVPGVGVPGVGVPGVGVPGVGVPGVGVPGVGVPGVGVPGVGVPGVGVPGVGVPGVGVPGVGVPGVGVPGVGVPGVGVPGVGVPGVGVPGVGVPGVGVPGVGVPGVGVPGVGVPGVGVPGVGVPGVGVPGVGVPGVGVPGVGVPGVGVPGVGVPGVGVPGVGVPGVGVPGVGVPGVGVPGVGVPGVGVPGVGVPGVGVPGVGVPGVGVPGVGVPGVGVPGVGVPGVGVPGVGVPGVGVPGVGVPGVGVPGVGVPGVGVPGVGVPGVGVPGVGVPGVGVPGVGVPGVGVPGVGVPGVGVPGVGVPGVGVPGVGVPGVGVPGVGVPGVGVPGVGVPGVGVPGVGVPGVGVPGVGVPGVGVPGVGVPGVGVPGVGVPGVGVPGVGVPGVGVPGVGVPGVGVPGVGVPGVGVPGVGVPGVGVPGVGVPGVGVPGXGVPGVGVPGVGVPGVGVPGVGVPGVGVPGVGVPGVGVPGVGVPGVGVPGVGVPGVGVPGVGVPGVGVPGVGVPGVGVPGVGVPGVGVPGVGVPGVGVPGVGVPGVGVPGVGVPGVGVPGVGVPGVGVPGVGVPGVGVPGVGVPGVGVPGVGVPGVGVPGVGVPGVGVPGVGVPGVGVPGVGVPGVGVPGVGVPGVGVPGVGVPGVGVPGVGVPGVGVPGVGVPGVGVPGVGVPGVGVPGVGVPGVGVPGVGVPGVGVPGVGVPGVGVPGVGVPGVGVPGVGVPGVGVPGVGVPGVGVPGVGVPGVGVPGVGVPGVGVPGVGVPGVGVPGVGVPGVGVPGVGVPGVGVPGVGVPGVGVPGVGVPGVGVPGVGVPGVGVPGVGVPGVGVPGVGVPGVGVPGVGVPGVGVPGVGVPGVGVPGVGVPGVGVPGVGVPGVGVPGVGVPGVGVPGVGVPGVGVPGVGVPGVGVPGVGVPGVGVPGVGVPGVGVPGVGVPGVGVPGVGVPGAGAGSGAGAGSGAGAGSGAGAGSGAGAGSGAGAGSGAGAGSGAGAGSGAGAGSGAGAGSGAGAGSGAGAGSGAGAGSGAGAGSGAGAGSGAGAGSGAGAGSGAGAGSGAGAGSGAGAGSGAGAGSGAGAGSGAGAGSGAGAGSGAGAGSGAGAGSGAGAGSGAGAGSGAGAGSGAGAGSGAGAGSGAGAGSGAGAGSGAGAGSGAGAGSGAGAGSGAGAGSGAGAGSGAGAGSGAGAGSGAGAGSGAGAGSGAGAGSGAGAGSGAGAGSGAGAGSGAGAGSGAGAGSGAGAGSGAGAGSGAGAGSGAGAGSGAGAGSGAGAGSGAGAGSGAGAGSGAGAGSGAGAGSGAGAGSGAGAGSGAGAGSGAGAGSGAGAGSGAGAGSGAGAGSGAGAGSGAGAGSGAGAGSGAGAGSGAGAGSGAGAGSGAGAGSGAGAGSGAGAGSGAGAGSGAGAGSGAGAGSGAGAGSGAGAGSGAGAGSGAGAGSGAGAGSGAGAGSGAGAGSGAGAGSGAGAGSGAGAGSGAGAGSGAGAGSGAGAGSGAGAGSGAGAGSGAGAGSGAGAGSGAGAGSGAGAGSGAGAGSGAGAGSGAGAGSGAGAGSGAGAGSGAGAGSGAGAGSGAGAGSGAGAGSGAGAGSGAGAGSGAGAGSGAGAGSGAGAGSGAGAGSGAGAGSGAGAGSGAGAGSGAGAGSGAGAGSGAGAGSGAGAGSGAGAGSGAGAGSGAGAGSGAGAGSGAGAGSGAGAGSGAGAGSGAGAGSGAGAGSGAGAGSGAGAGSGAGAGSGAGAGSGAGAGSGAGAGSGAGAGSGAGAGSGAGAGSGAGAGSGAGAGSGAGAGSGAGAGSGAGAGSGAGAGSGAGAGSGAGAGSGAGAGSGAGAGSGAGAGSGAGAGSGAGAGSGAGAGSGAGAGSGAGAGSGAGAGSGAGAGSGAGAGSGAGAGSGAGAGSGAGAGSGAGAGSGAGAGSGAGAGSGAGAGSGAGAGSGAGAGSGAGAGSGAGAGSGAGAGSGAGAGSGAGAGSGAGAGSGAGAGSGAGAGSGAGAGSGAGAGSGAGAGSGAGAGSGAGAGSGAGAGSGAGAGSGAGAGSGAGAGSGAGAGSGAGAGSGAGAGSGAGAGSGAGAGSGAGAGSGAGAGSGAGAGSGAGAGSGAGAGSGAGAGSGAGAGSGAGAGSGAGAGSGAGAGSGAGAGSGAGAGSGAGAGSGAGAGSGAGAGSGVGVPGVGVPGVGVPGVGVPGVGVPGVGVPGVGVPGVGVPGVGVPGVGVPGVGVPGVGVPGVGVPGVGVPGVGVPGVGVPGVGVPGVGVPGVGVPGVGVPGVGVPGVGVPGVGVPGVGVPGVGVPGVGVPGVGVPGVGVPGVGVPGVGVPGVGVPGVGVPGVGVPGVGVPGVGVPGVGVPGVGVPGVGVPGVGVPGVGVPGVGVPGVGVPGVGVPGVGVPGVGVPGVGVPGVGVPGVGVPGVGVPGVGVPGVGVPGVGVPGVGVPGVGVPGVGVPGVGVPGVGVPGVGVPGVGVPGVGVPGVGVPGVGVPGVGVPGVGVPGVGVPGVGVPGVGVPGVGVPGVGVPGVGVPGVGVPGVGVPGVGVPGVGVPGVGVPGVGVPGVGVPGVGVPGVGVPGVGVPGVGVPGVGVPGVGVPGVGVPGVGVPGVGVPGVGVPGVGVPGVGVPGVGVPGVGVPGVGVPGVGVPGVGVPGVGVPGVGVPGVGVPGVGVPGVGVPGVGVPGXGVPGVGVPGVGVPGVGVPGVGVPGVGVPGVGVPGVGVPGVGVPGVGVPGVGVPGVGVPGVGVPGVGVPGVGVPGVGVPGVGVPGVGVPGVGVPGVGVPGVGVPGVGVPGVGVPGVGVPGVGVPGVGVPGVGVPGVGVPGVGVPGVGVPGVGVPGVGVPGVGVPGVGVPGVGVPGVGVPGVGVPGVGVPGVGVPGVGVPGVGVPGVGVPGVGVPGVGVPGVGVPGVGVPGVGVPGVGVPGVGVPGVGVPGVGVPGVGVPGVGVPGVGVPGVGVPGVGVPGVGVPGVGVPGVGVPGVGVPGVGVPGVGVPGVGVPGVGVPGVGVPGVGVPGVGVPGVGVPGVGVPGVGVPGVGVPGVGVPGVGVPGVGVPGVGVPGVGVPGVGVPGVGVPGVGVPGVGVPGVGVPGVGVPGVGVPGVGVPGVGVPGVGVPGVGVPGVGVPGVGVPGVGVPGVGVPGVGVPGVGVPGVGVPGVGVPGVGVPGVGVPGVGVPGVGVPGVGVPGVGVPGAGAGSGAGAGSGAGAGSGAGAGSGAGAGSGAGAGSGAGAGSGAGAGSGAGAGSGAGAGSGAGAGSGAGAGSGAGAGSGAGAGSGAGAGSGAGAGSGAGAGSGAGAGSGAGAGSGAGAGSGAGAGSGAGAGSGAGAGSGAGAGSGAGAGSGAGAGSGAGAGSGAGAGSGAGAGSGAGAGSGAGAGSGAGAGSGAGAGSGAGAGSGAGAGSGAGAGSGAGAGSGAGAGSGAGAGSGAGAGSGAGAGSGAGAGSGAGAGSGAGAGSGAGAGSGAGAGSGAGAGSGAGAGSGAGAGSGAGAGSGAGAGSGAGAGSGAGAGSGAGAGSGAGAGSGAGAGSGAGAGSGAGAGSGAGAGSGAGAGSGAGAGSGAGAGSGAGAGSGAGAGSGAGAGSGAGAGSGAGAGSGAGAGSGAGAGSGAGAGSGAGAGSGAGAGSGAGAGSGAGAGSGAGAGSGAGAGSGAGAGSGAGAGSGAGAGSGAGAGSGAGAGSGAGAGSGAGAGSGAGAGSGAGAGSGAGAGSGAGAGSGAGAGSGAGAGSGAGAGSGAGAGSGAGAGSGAGAGSGAGAGSGAGAGSGAGAGSGAGAGSGAGAGSGAGAGSGAGAGSGAGAGSGAGAGSGAGAGSGAGAGSGAGAGSGAGAGSGAGAGSGAGAGSGAGAGSGAGAGSGAGAGSGAGAGSGAGAGSGAGAGSGAGAGSGAGAGSGAGAGSGAGAGSGAGAGSGAGAGSGAGAGSGAGAGSGAGAGSGAGAGSGAGAGSGAGAGSGAGAGSGAGAGSGAGAGSGAGAGSGAGAGSGAGAGSGAGAGSGAGAGSGAGAGSGAGAGSGAGAGSGAGAGSGAGAGSGAGAGSGAGAGSGAGAGSGAGAGSGAGAGSGAGAGSGAGAGSGAGAGSGAGAGSGAGAGSGAGAGSGAGAGSGAGAGSGAGAGSGAGAGSGAGAGSGAGAGSGAGAGSGAGAGSGAGAGSGAGAGSGAGAGSGAGAGSGAGAGSGAGAGSGAGAGSGAGAGSGAGAGSGAGAGSGAGAGSGAGAGSGAGAGSGAGAGSGAGAGSGAGAGSGAGAGSGAGAGSGAGAGSGAGAGSGAGAGSGAGAGSGAGAGSGAGAGSGAGAGSGAGAGSGAGAGSGAGAGSGAGAGSGAGAGSGAGAGSGAGAGSGAGAGSGAGAGSGAGAGSGAGAGSGAGAGSGAGAGSGAGAGSGAGAGSGAGAGSGAGAGSGAGAGSGVGVPGVGVPGVGVPGVGVPGVGVPGVGVPGVGVPGVGVPGVGVPGVGVPGVGVPGVGVPGVGVPGVGVPGVGVPGVGVPGVGVPGVGVPGVGVPGVGVPGVGVPGVGVPGVGVPGVGVPGVGVPGVGVPGVGVPGVGVPGVGVPGVGVPGVGVPGVGVPGVGVPGVGVPGVGVPGVGVPGVGVPGVGVPGVGVPGVGVPGVGVPGVGVPGVGVPGVGVPGVGVPGVGVPGVGVPGVGVPGVGVPGVGVPGVGVPGVGVPGVGVPGVGVPGVGVPGVGVPGVGVPGVGVPGVGVPGVGVPGVGVPGVGVPGVGVPGVGVPGVGVPGVGVPGVGVPGVGVPGVGVPGVGVPGVGVPGVGVPGVGVPGVGVPGVGVPGVGVPGVGVPGVGVPGVGVPGVGVPGVGVPGVGVPGVGVPGVGVPGVGVPGVGVPGVGVPGVGVPGVGVPGVGVPGVGVPGVGVPGVGVPGVGVPGVGVPGVGVPGVGVPGVGVPGVGVPGVGVPGXGVPGVGVPGVGVPGVGVPGVGVPGVGVPGVGVPGVGVPGVGVPGVGVPGVGVPGVGVPGVGVPGVGVPGVGVPGVGVPGVGVPGVGVPGVGVPGVGVPGVGVPGVGVPGVGVPGVGVPGVGVPGVGVPGVGVPGVGVPGVGVPGVGVPGVGVPGVGVPGVGVPGVGVPGVGVPGVGVPGVGVPGVGVPGVGVPGVGVPGVGVPGVGVPGVGVPGVGVPGVGVPGVGVPGVGVPGVGVPGVGVPGVGVPGVGVPGVGVPGVGVPGVGVPGVGVPGVGVPGVGVPGVGVPGVGVPGVGVPGVGVPGVGVPGVGVPGVGVPGVGVPGVGVPGVGVPGVGVPGVGVPGVGVPGVGVPGVGVPGVGVPGVGVPGVGVPGVGVPGVGVPGVGVPGVGVPGVGVPGVGVPGVGVPGVGVPGVGVPGVGVPGVGVPGVGVPGVGVPGVGVPGVGVPGVGVPGVGVPGVGVPGVGVPGVGVPGVGVPGVGVPGVGVPGVGVPGVGVPGVGVPGAGAGSGAGAGSGAGAGSGAGAGSGAGAGSGAGAGSGAGAGSGAGAGSGAGAGSGAGAGSGAGAGSGAGAGSGAGAGSGAGAGSGAGAGSGAGAGSGAGAGSGAGAGSGAGAGSGAGAGSGAGAGSGAGAGSGAGAGSGAGAGSGAGAGSGAGAGSGAGAGSGAGAGSGAGAGSGAGAGSGAGAGSGAGAGSGAGAGSGAGAGSGAGAGSGAGAGSGAGAGSGAGAGSGAGAGSGAGAGSGAGAGSGAGAGSGAGAGSGAGAGSGAGAGSGAGAGSGAGAGSGAGAGSGAGAGSGAGAGSGAGAGSGAGAGSGAGAGSGAGAGSGAGAGSGAGAGSGAGAGSGAGAGSGAGAGSGAGAGSGAGAGSGAGAGSGAGAGSGAGAGSGAGAGSGAGAGSGAGAGSGAGAGSGAGAGSGAGAGSGAGAGSGAGAGSGAGAGSGAGAGSGAGAGSGAGAGSGAGAGSGAGAGSGAGAGSGAGAGSGAGAGSGAGAGSGAGAGSGAGAGSGAGAGSGAGAGSGAGAGSGAGAGSGAGAGSGAGAGSGAGAGSGAGAGSGAGAGSGAGAGSGAGAGSGAGAGSGAGAGSGAGAGSGAGAGSGAGAGSGAGAGSGAGAGSGAGAGSGAGAGSGAGAGSGAGAGSGAGAGSGAGAGSGAGAGSGAGAGSGAGAGSGAGAGSGAGAGSGAGAGSGAGAGSGAGAGSGAGAGSGAGAGSGAGAGSGAGAGSGAGAGSGAGAGSGAGAGSGAGAGSGAGAGSGAGAGSGAGAGSGAGAGSGAGAGSGAGAGSGAGAGSGAGAGSGAGAGSGAGAGSGAGAGSGAGAGSGAGAGSGAGAGSGAGAGSGAGAGSGAGAGSGAGAGSGAGAGSGAGAGSGAGAGSGAGAGSGAGAGSGAGAGSGAGAGSGAGAGSGAGAGSGAGAGSGAGAGSGAGAGSGAGAGSGAGAGSGAGAGSGAGAGSGAGAGSGAGAGSGAGAGSGAGAGSGAGAGSGAGAGSGAGAGSGAGAGSGAGAGSGAGAGSGAGAGSGAGAGSGAGAGSGAGAGSGAGAGSGAGAGSGAGAGSGAGAGSGAGAGSGAGAGSGAGAGSGAGAGSGAGAGSGAGAGSGAGAGSGAGAGSGAGAGSGAGAGSGAGAGSGAGAGSGAGAGSGAGAGSGAGAGSGAGAGSGAGAGSGAGAGSGAGAGSGAGAGSGAGAGSGAGAGSGAGAGSGAGAGSGAGAGSGVGVPGVGVPGVGVPGVGVPGVGVPGVGVPGVGVPGVGVPGVGVPGVGVPGVGVPGVGVPGVGVPGVGVPGVGVPGVGVPGVGVPGVGVPGVGVPGVGVPGVGVPGVGVPGVGVPGVGVPGVGVPGVGVPGVGVPGVGVPGVGVPGVGVPGVGVPGVGVPGVGVPGVGVPGVGVPGVGVPGVGVPGVGVPGVGVPGVGVPGVGVPGVGVPGVGVPGVGVPGVGVPGVGVPGVGVPGVGVPGVGVPGVGVPGVGVPGVGVPGVGVPGVGVPGVGVPGVGVPGVGVPGVGVPGVGVPGVGVPGVGVPGVGVPGVGVPGVGVPGVGVPGVGVPGVGVPGVGVPGVGVPGVGVPGVGVPGVGVPGVGVPGVGVPGVGVPGVGVPGVGVPGVGVPGVGVPGVGVPGVGVPGVGVPGVGVPGVGVPGVGVPGVGVPGVGVPGVGVPGVGVPGVGVPGVGVPGVGVPGVGVPGVGVPGVGVPGVGVPGVGVPGVGVPGVGVPGVGVPGXGVPGVGVPGVGVPGVGVPGVGVPGVGVPGVGVPGVGVPGVGVPGVGVPGVGVPGVGVPGVGVPGVGVPGVGVPGVGVPGVGVPGVGVPGVGVPGVGVPGVGVPGVGVPGVGVPGVGVPGVGVPGVGVPGVGVPGVGVPGVGVPGVGVPGVGVPGVGVPGVGVPGVGVPGVGVPGVGVPGVGVPGVGVPGVGVPGVGVPGVGVPGVGVPGVGVPGVGVPGVGVPGVGVPGVGVPGVGVPGVGVPGVGVPGVGVPGVGVPGVGVPGVGVPGVGVPGVGVPGVGVPGVGVPGVGVPGVGVPGVGVPGVGVPGVGVPGVGVPGVGVPGVGVPGVGVPGVGVPGVGVPGVGVPGVGVPGVGVPGVGVPGVGVPGVGVPGVGVPGVGVPGVGVPGVGVPGVGVPGVGVPGVGVPGVGVPGVGVPGVGVPGVGVPGVGVPGVGVPGVGVPGVGVPGVGVPGVGVPGVGVPGVGVPGVGVPGVGVPGVGVPGVGVPGVGVPGVGVPGVGVPGAGAGSGAGAGSGAGAGSGAGAGSGAGAGSGAGAGSGAGAGSGAGAGSGAGAGSGAGAGSGAGAGSGAGAGSGAGAGSGAGAGSGAGAGSGAGAGSGAGAGSGAGAGSGAGAGSGAGAGSGAGAGSGAGAGSGAGAGSGAGAGSGAGAGSGAGAGSGAGAGSGAGAGSGAGAGSGAGAGSGAGAGSGAGAGSGAGAGSGAGAGSGAGAGSGAGAGSGAGAGSGAGAGSGAGAGSGAGAGSGAGAGSGAGAGSGAGAGSGAGAGSGAGAGSGAGAGSGAGAGSGAGAGSGAGAGSGAGAGSGAGAGSGAGAGSGAGAGSGAGAGSGAGAGSGAGAGSGAGAGSGAGAGSGAGAGSGAGAGSGAGAGSGAGAGSGAGAGSGAGAGSGAGAGSGAGAGSGAGAGSGAGAGSGAGAGSGAGAGSGAGAGSGAGAGSGAGAGSGAGAGSGAGAGSGAGAGSGAGAGSGAGAGSGAGAGSGAGAGSGAGAGSGAGAGSGAGAGSGAGAGSGAGAGSGAGAGSGAGAGSGAGAGSGAGAGSGAGAGSGAGAGSGAGAGSGAGAGSGAGAGSGAGAGSGAGAGSGAGAGSGAGAGSGAGAGSGAGAGSGAGAGSGAGAGSGAGAGSGAGAGSGAGAGSGAGAGSGAGAGSGAGAGSGAGAGSGAGAGSGAGAGSGAGAGSGAGAGSGAGAGSGAGAGSGAGAGSGAGAGSGAGAGSGAGAGSGAGAGSGAGAGSGAGAGSGAGAGSGAGAGSGAGAGSGAGAGSGAGAGSGAGAGSGAGAGSGAGAGSGAGAGSGAGAGSGAGAGSGAGAGSGAGAGSGAGAGSGAGAGSGAGAGSGAGAGSGAGAGSGAGAGSGAGAGSGAGAGSGAGAGSGAGAGSGAGAGSGAGAGSGAGAGSGAGAGSGAGAGSGAGAGSGAGAGSGAGAGSGAGAGSGAGAGSGAGAGSGAGAGSGAGAGSGAGAGSGAGAGSGAGAGSGAGAGSGAGAGSGAGAGSGAGAGSGAGAGSGAGAGSGAGAGSGAGAGSGAGAGSGAGAGSGAGAGSGAGAGSGAGAGSGAGAGSGAGAGSGAGAGSGAGAGSGAGAGSGAGAGSGAGAGSGAGAGSGAGAGSGAGAGSGAGAGSGAGAGSGAGAGSGAGAGSGAGAGSGAGAGSGAGAGSGAGAGSGAGAGSGAGAGSGAGAGSGAGAGSGAGAGSGAGAGSGAGAGSGAGAGSGAGAGSGVGVPGVGVPGVGVPGVGVPGVGVPGVGVPGVGVPGVGVPGVGVPGVGVPGVGVPGVGVPGVGVPGVGVPGVGVPGVGVPGVGVPGVGVPGVGVPGVGVPGVGVPGVGVPGVGVPGVGVPGVGVPGVGVPGVGVPGVGVPGVGVPGVGVPGVGVPGVGVPGVGVPGVGVPGVGVPGVGVPGVGVPGVGVPGVGVPGVGVPGVGVPGVGVPGVGVPGVGVPGVGVPGVGVPGVGVPGVGVPGVGVPGVGVPGVGVPGVGVPGVGVPGVGVPGVGVPGVGVPGVGVPGVGVPGVGVPGVGVPGVGVPGVGVPGVGVPGVGVPGVGVPGVGVPGVGVPGVGVPGVGVPGVGVPGVGVPGVGVPGVGVPGVGVPGVGVPGVGVPGVGVPGVGVPGVGVPGVGVPGVGVPGVGVPGVGVPGVGVPGVGVPGVGVPGVGVPGVGVPGVGVPGVGVPGVGVPGVGVPGVGVPGVGVPGVGVPGVGVPGVGVPGVGVPGVGVPGVGVPGXGVPGVGVPGVGVPGVGVPGVGVPGVGVPGVGVPGVGVPGVGVPGVGVPGVGVPGVGVPGVGVPGVGVPGVGVPGVGVPGVGVPGVGVPGVGVPGVGVPGVGVPGVGVPGVGVPGVGVPGVGVPGVGVPGVGVPGVGVPGVGVPGVGVPGVGVPGVGVPGVGVPGVGVPGVGVPGVGVPGVGVPGVGVPGVGVPGVGVPGVGVPGVGVPGVGVPGVGVPGVGVPGVGVPGVGVPGVGVPGVGVPGVGVPGVGVPGVGVPGVGVPGVGVPGVGVPGVGVPGVGVPGVGVPGVGVPGVGVPGVGVPGVGVPGVGVPGVGVPGVGVPGVGVPGVGVPGVGVPGVGVPGVGVPGVGVPGVGVPGVGVPGVGVPGVGVPGVGVPGVGVPGVGVPGVGVPGVGVPGVGVPGVGVPGVGVPGVGVPGVGVPGVGVPGVGVPGVGVPGVGVPGVGVPGVGVPGVGVPGVGVPGVGVPGVGVPGVGVPGVGVPGVGVPGVGVPGVGVPGVGVPGAGAGSGAGAGSGAGAGSGAGAGSGAGAGSGAGAGSGAGAGSGAGAGSGAGAGSGAGAGSGAGAGSGAGAGSGAGAGSGAGAGSGAGAGSGAGAGSGAGAGSGAGAGSGAGAGSGAGAGSGAGAGSGAGAGSGAGAGSGAGAGSGAGAGSGAGAGSGAGAGSGAGAGSGAGAGSGAGAGSGAGAGSGAGAGSGAGAGSGAGAGSGAGAGSGAGAGSGAGAGSGAGAGSGAGAGSGAGAGSGAGAGSGAGAGSGAGAGSGAGAGSGAGAGSGAGAGSGAGAGSGAGAGSGAGAGSGAGAGSGAGAGSGAGAGSGAGAGSGAGAGSGAGAGSGAGAGSGAGAGSGAGAGSGAGAGSGAGAGSGAGAGSGAGAGSGAGAGSGAGAGSGAGAGSGAGAGSGAGAGSGAGAGSGAGAGSGAGAGSGAGAGSGAGAGSGAGAGSGAGAGSGAGAGSGAGAGSGAGAGSGAGAGSGAGAGSGAGAGSGAGAGSGAGAGSGAGAGSGAGAGSGAGAGSGAGAGSGAGAGSGAGAGSGAGAGSGAGAGSGAGAGSGAGAGSGAGAGSGAGAGSGAGAGSGAGAGSGAGAGSGAGAGSGAGAGSGAGAGSGAGAGSGAGAGSGAGAGSGAGAGSGAGAGSGAGAGSGAGAGSGAGAGSGAGAGSGAGAGSGAGAGSGAGAGSGAGAGSGAGAGSGAGAGSGAGAGSGAGAGSGAGAGSGAGAGSGAGAGSGAGAGSGAGAGSGAGAGSGAGAGSGAGAGSGAGAGSGAGAGSGAGAGSGAGAGSGAGAGSGAGAGSGAGAGSGAGAGSGAGAGSGAGAGSGAGAGSGAGAGSGAGAGSGAGAGSGAGAGSGAGAGSGAGAGSGAGAGSGAGAGSGAGAGSGAGAGSGAGAGSGAGAGSGAGAGSGAGAGSGAGAGSGAGAGSGAGAGSGAGAGSGAGAGSGAGAGSGAGAGSGAGAGSGAGAGSGAGAGSGAGAGSGAGAGSGAGAGSGAGAGSGAGAGSGAGAGSGAGAGSGAGAGSGAGAGSGAGAGSGAGAGSGAGAGSGAGAGSGAGAGSGAGAGSGAGAGSGAGAGSGAGAGSGAGAGSGAGAGSGAGAGSGAGAGSGAGAGSGAGAGSGAGAGSGAGAGSGAGAGSGAGAGSGAGAGSGAGAGSGAGAGSGAGAGSGAGAGSGAGAGSGAGAGSGAGAGSGAGAGSGAGAGSGAGAGSGAGAGSGAGAGSGVGVPGVGVPGVGVPGVGVPGVGVPGVGVPGVGVPGVGVPGVGVPGVGVPGVGVPGVGVPGVGVPGVGVPGVGVPGVGVPGVGVPGVGVPGVGVPGVGVPGVGVPGVGVPGVGVPGVGVPGVGVPGVGVPGVGVPGVGVPGVGVPGVGVPGVGVPGVGVPGVGVPGVGVPGVGVPGVGVPGVGVPGVGVPGVGVPGVGVPGVGVPGVGVPGVGVPGVGVPGVGVPGVGVPGVGVPGVGVPGVGVPGVGVPGVGVPGVGVPGVGVPGVGVPGVGVPGVGVPGVGVPGVGVPGVGVPGVGVPGVGVPGVGVPGVGVPGVGVPGVGVPGVGVPGVGVPGVGVPGVGVPGVGVPGVGVPGVGVPGVGVPGVGVPGVGVPGVGVPGVGVPGVGVPGVGVPGVGVPGVGVPGVGVPGVGVPGVGVPGVGVPGVGVPGVGVPGVGVPGVGVPGVGVPGVGVPGVGVPGVGVPGVGVPGVGVPGVGVPGVGVPGVGVPGVGVPGVGVPGXGVPGVGVPGVGVPGVGVPGVGVPGVGVPGVGVPGVGVPGVGVPGVGVPGVGVPGVGVPGVGVPGVGVPGVGVPGVGVPGVGVPGVGVPGVGVPGVGVPGVGVPGVGVPGVGVPGVGVPGVGVPGVGVPGVGVPGVGVPGVGVPGVGVPGVGVPGVGVPGVGVPGVGVPGVGVPGVGVPGVGVPGVGVPGVGVPGVGVPGVGVPGVGVPGVGVPGVGVPGVGVPGVGVPGVGVPGVGVPGVGVPGVGVPGVGVPGVGVPGVGVPGVGVPGVGVPGVGVPGVGVPGVGVPGVGVPGVGVPGVGVPGVGVPGVGVPGVGVPGVGVPGVGVPGVGVPGVGVPGVGVPGVGVPGVGVPGVGVPGVGVPGVGVPGVGVPGVGVPGVGVPGVGVPGVGVPGVGVPGVGVPGVGVPGVGVPGVGVPGVGVPGVGVPGVGVPGVGVPGVGVPGVGVPGVGVPGVGVPGVGVPGVGVPGVGVPGVGVPGVGVPGVGVPGVGVPGVGVPGVGVPGAGAGSGAGAGSGAGAGSGAGAGSGAGAGSGAGAGSGAGAGSGAGAGSGAGAGSGAGAGSGAGAGSGAGAGSGAGAGSGAGAGSGAGAGSGAGAGSGAGAGSGAGAGSGAGAGSGAGAGSGAGAGSGAGAGSGAGAGSGAGAGSGAGAGSGAGAGSGAGAGSGAGAGSGAGAGSGAGAGSGAGAGSGAGAGSGAGAGSGAGAGSGAGAGSGAGAGSGAGAGSGAGAGSGAGAGSGAGAGSGAGAGSGAGAGSGAGAGSGAGAGSGAGAGSGAGAGSGAGAGSGAGAGSGAGAGSGAGAGSGAGAGSGAGAGSGAGAGSGAGAGSGAGAGSGAGAGSGAGAGSGAGAGSGAGAGSGAGAGSGAGAGSGAGAGSGAGAGSGAGAGSGAGAGSGAGAGSGAGAGSGAGAGSGAGAGSGAGAGSGAGAGSGAGAGSGAGAGSGAGAGSGAGAGSGAGAGSGAGAGSGAGAGSGAGAGSGAGAGSGAGAGSGAGAGSGAGAGSGAGAGSGAGAGSGAGAGSGAGAGSGAGAGSGAGAGSGAGAGSGAGAGSGAGAGSGAGAGSGAGAGSGAGAGSGAGAGSGAGAGSGAGAGSGAGAGSGAGAGSGAGAGSGAGAGSGAGAGSGAGAGSGAGAGSGAGAGSGAGAGSGAGAGSGAGAGSGAGAGSGAGAGSGAGAGSGAGAGSGAGAGSGAGAGSGAGAGSGAGAGSGAGAGSGAGAGSGAGAGSGAGAGSGAGAGSGAGAGSGAGAGSGAGAGSGAGAGSGAGAGSGAGAGSGAGAGSGAGAGSGAGAGSGAGAGSGAGAGSGAGAGSGAGAGSGAGAGSGAGAGSGAGAGSGAGAGSGAGAGSGAGAGSGAGAGSGAGAGSGAGAGSGAGAGSGAGAGSGAGAGSGAGAGSGAGAGSGAGAGSGAGAGSGAGAGSGAGAGSGAGAGSGAGAGSGAGAGSGAGAGSGAGAGSGAGAGSGAGAGSGAGAGSGAGAGSGAGAGSGAGAGSGAGAGSGAGAGSGAGAGSGAGAGSGAGAGSGAGAGSGAGAGSGAGAGSGAGAGSGAGAGSGAGAGSGAGAGSGAGAGSGAGAGSGAGAGSGAGAGSGAGAGSGAGAGSGAGAGSGAGAGSGAGAGSGAGAGSGAGAGSGAGAGSGAGAGSGAGAGSGAGAGSGAGAGSGAGAGSGAGAGSGAGAGSGAGAGSGAGAGSGAGAGSGAGAGSGAGAGSGAGAGSGVGVPGVGVPGVGVPGVGVPGVGVPGVGVPGVGVPGVGVPGVGVPGVGVPGVGVPGVGVPGVGVPGVGVPGVGVPGVGVPGVGVPGVGVPGVGVPGVGVPGVGVPGVGVPGVGVPGVGVPGVGVPGVGVPGVGVPGVGVPGVGVPGVGVPGVGVPGVGVPGVGVPGVGVPGVGVPGVGVPGVGVPGVGVPGVGVPGVGVPGVGVPGVGVPGVGVPGVGVPGVGVPGVGVPGVGVPGVGVPGVGVPGVGVPGVGVPGVGVPGVGVPGVGVPGVGVPGVGVPGVGVPGVGVPGVGVPGVGVPGVGVPGVGVPGVGVPGVGVPGVGVPGVGVPGVGVPGVGVPGVGVPGVGVPGVGVPGVGVPGVGVPGVGVPGVGVPGVGVPGVGVPGVGVPGVGVPGVGVPGVGVPGVGVPGVGVPGVGVPGVGVPGVGVPGVGVPGVGVPGVGVPGVGVPGVGVPGVGVPGVGVPGVGVPGVGVPGVGVPGVGVPGVGVPGVGVPGVGVPGXGVPGVGVPGVGVPGVGVPGVGVPGVGVPGVGVPGVGVPGVGVPGVGVPGVGVPGVGVPGVGVPGVGVPGVGVPGVGVPGVGVPGVGVPGVGVPGVGVPGVGVPGVGVPGVGVPGVGVPGVGVPGVGVPGVGVPGVGVPGVGVPGVGVPGVGVPGVGVPGVGVPGVGVPGVGVPGVGVPGVGVPGVGVPGVGVPGVGVPGVGVPGVGVPGVGVPGVGVPGVGVPGVGVPGVGVPGVGVPGVGVPGVGVPGVGVPGVGVPGVGVPGVGVPGVGVPGVGVPGVGVPGVGVPGVGVPGVGVPGVGVPGVGVPGVGVPGVGVPGVGVPGVGVPGVGVPGVGVPGVGVPGVGVPGVGVPGVGVPGVGVPGVGVPGVGVPGVGVPGVGVPGVGVPGVGVPGVGVPGVGVPGVGVPGVGVPGVGVPGVGVPGVGVPGVGVPGVGVPGVGVPGVGVPGVGVPGVGVPGVGVPGVGVPGVGVPGVGVPGVGVPGVGVPGVGVPGVGVPGVGVPGAGAGSGAGAGSGAGAGSGAGAGSGAGAGSGAGAGSGAGAGSGAGAGSGAGAGSGAGAGSGAGAGSGAGAGSGAGAGSGAGAGSGAGAGSGAGAGSGAGAGSGAGAGSGAGAGSGAGAGSGAGAGSGAGAGSGAGAGSGAGAGSGAGAGSGAGAGSGAGAGSGAGAGSGAGAGSGAGAGSGAGAGSGAGAGSGAGAGSGAGAGSGAGAGSGAGAGSGAGAGSGAGAGSGAGAGSGAGAGSGAGAGSGAGAGSGAGAGSGAGAGSGAGAGSGAGAGSGAGAGSGAGAGSGAGAGSGAGAGSGAGAGSGAGAGSGAGAGSGAGAGSGAGAGSGAGAGSGAGAGSGAGAGSGAGAGSGAGAGSGAGAGSGAGAGSGAGAGSGAGAGSGAGAGSGAGAGSGAGAGSGAGAGSGAGAGSGAGAGSGAGAGSGAGAGSGAGAGSGAGAGSGAGAGSGAGAGSGAGAGSGAGAGSGAGAGSGAGAGSGAGAGSGAGAGSGAGAGSGAGAGSGAGAGSGAGAGSGAGAGSGAGAGSGAGAGSGAGAGSGAGAGSGAGAGSGAGAGSGAGAGSGAGAGSGAGAGSGAGAGSGAGAGSGAGAGSGAGAGSGAGAGSGAGAGSGAGAGSGAGAGSGAGAGSGAGAGSGAGAGSGAGAGSGAGAGSGAGAGSGAGAGSGAGAGSGAGAGSGAGAGSGAGAGSGAGAGSGAGAGSGAGAGSGAGAGSGAGAGSGAGAGSGAGAGSGAGAGSGAGAGSGAGAGSGAGAGSGAGAGSGAGAGSGAGAGSGAGAGSGAGAGSGAGAGSGAGAGSGAGAGSGAGAGSGAGAGSGAGAGSGAGAGSGAGAGSGAGAGSGAGAGSGAGAGSGAGAGSGAGAGSGAGAGSGAGAGSGAGAGSGAGAGSGAGAGSGAGAGSGAGAGSGAGAGSGAGAGSGAGAGSGAGAGSGAGAGSGAGAGSGAGAGSGAGAGSGAGAGSGAGAGSGAGAGSGAGAGSGAGAGSGAGAGSGAGAGSGAGAGSGAGAGSGAGAGSGAGAGSGAGAGSGAGAGSGAGAGSGAGAGSGAGAGSGAGAGSGAGAGSGAGAGSGAGAGSGAGAGSGAGAGSGAGAGSGAGAGSGAGAGSGAGAGSGAGAGSGAGAGSGAGAGSGAGAGSGAGAGSGAGAGSGAGAGSGAGAGSGAGAGSGAGAGSGAGAGSGAGAGSGAGAGSGAGAGSGAGAGSGAGAGSGVGVPGVGVPGVGVPGVGVPGVGVPGVGVPGVGVPGVGVPGVGVPGVGVPGVGVPGVGVPGVGVPGVGVPGVGVPGVGVPGVGVPGVGVPGVGVPGVGVPGVGVPGVGVPGVGVPGVGVPGVGVPGVGVPGVGVPGVGVPGVGVPGVGVPGVGVPGVGVPGVGVPGVGVPGVGVPGVGVPGVGVPGVGVPGVGVPGVGVPGVGVPGVGVPGVGVPGVGVPGVGVPGVGVPGVGVPGVGVPGVGVPGVGVPGVGVPGVGVPGVGVPGVGVPGVGVPGVGVPGVGVPGVGVPGVGVPGVGVPGVGVPGVGVPGVGVPGVGVPGVGVPGVGVPGVGVPGVGVPGVGVPGVGVPGVGVPGVGVPGVGVPGVGVPGVGVPGVGVPGVGVPGVGVPGVGVPGVGVPGVGVPGVGVPGVGVPGVGVPGVGVPGVGVPGVGVPGVGVPGVGVPGVGVPGVGVPGVGVPGVGVPGVGVPGVGVPGVGVPGVGVPGVGVPGVGVPGVGVPGXGVPGVGVPGVGVPGVGVPGVGVPGVGVPGVGVPGVGVPGVGVPGVGVPGVGVPGVGVPGVGVPGVGVPGVGVPGVGVPGVGVPGVGVPGVGVPGVGVPGVGVPGVGVPGVGVPGVGVPGVGVPGVGVPGVGVPGVGVPGVGVPGVGVPGVGVPGVGVPGVGVPGVGVPGVGVPGVGVPGVGVPGVGVPGVGVPGVGVPGVGVPGVGVPGVGVPGVGVPGVGVPGVGVPGVGVPGVGVPGVGVPGVGVPGVGVPGVGVPGVGVPGVGVPGVGVPGVGVPGVGVPGVGVPGVGVPGVGVPGVGVPGVGVPGVGVPGVGVPGVGVPGVGVPGVGVPGVGVPGVGVPGVGVPGVGVPGVGVPGVGVPGVGVPGVGVPGVGVPGVGVPGVGVPGVGVPGVGVPGVGVPGVGVPGVGVPGVGVPGVGVPGVGVPGVGVPGVGVPGVGVPGVGVPGVGVPGVGVPGVGVPGVGVPGVGVPGVGVPGVGVPGVGVPGVGVPGVGVPGVGVPGAGAGSGAGAGSGAGAGSGAGAGSGAGAGSGAGAGSGAGAGSGAGAGSGAGAGSGAGAGSGAGAGSGAGAGSGAGAGSGAGAGSGAGAGSGAGAGSGAGAGSGAGAGSGAGAGSGAGAGSGAGAGSGAGAGSGAGAGSGAGAGSGAGAGSGAGAGSGAGAGSGAGAGSGAGAGSGAGAGSGAGAGSGAGAGSGAGAGSGAGAGSGAGAGSGAGAGSGAGAGSGAGAGSGAGAGSGAGAGSGAGAGSGAGAGSGAGAGSGAGAGSGAGAGSGAGAGSGAGAGSGAGAGSGAGAGSGAGAGSGAGAGSGAGAGSGAGAGSGAGAGSGAGAGSGAGAGSGAGAGSGAGAGSGAGAGSGAGAGSGAGAGSGAGAGSGAGAGSGAGAGSGAGAGSGAGAGSGAGAGSGAGAGSGAGAGSGAGAGSGAGAGSGAGAGSGAGAGSGAGAGSGAGAGSGAGAGSGAGAGSGAGAGSGAGAGSGAGAGSGAGAGSGAGAGSGAGAGSGAGAGSGAGAGSGAGAGSGAGAGSGAGAGSGAGAGSGAGAGSGAGAGSGAGAGSGAGAGSGAGAGSGAGAGSGAGAGSGAGAGSGAGAGSGAGAGSGAGAGSGAGAGSGAGAGSGAGAGSGAGAGSGAGAGSGAGAGSGAGAGSGAGAGSGAGAGSGAGAGSGAGAGSGAGAGSGAGAGSGAGAGSGAGAGSGAGAGSGAGAGSGAGAGSGAGAGSGAGAGSGAGAGSGAGAGSGAGAGSGAGAGSGAGAGSGAGAGSGAGAGSGAGAGSGAGAGSGAGAGSGAGAGSGAGAGSGAGAGSGAGAGSGAGAGSGAGAGSGAGAGSGAGAGSGAGAGSGAGAGSGAGAGSGAGAGSGAGAGSGAGAGSGAGAGSGAGAGSGAGAGSGAGAGSGAGAGSGAGAGSGAGAGSGAGAGSGAGAGSGAGAGSGAGAGSGAGAGSGAGAGSGAGAGSGAGAGSGAGAGSGAGAGSGAGAGSGAGAGSGAGAGSGAGAGSGAGAGSGAGAGSGAGAGSGAGAGSGAGAGSGAGAGSGAGAGSGAGAGSGAGAGSGAGAGSGAGAGSGAGAGSGAGAGSGAGAGSGAGAGSGAGAGSGAGAGSGAGAGSGAGAGSGAGAGSGAGAGSGAGAGSGAGAGSGAGAGSGAGAGSGAGAGSGAGAGSGAGAGSGAGAGSGAGAGSGAGAGSGAGAGSGAGAGSGAGAGSGAGAGSGAGAGSGVGVPGVGVPGVGVPGVGVPGVGVPGVGVPGVGVPGVGVPGVGVPGVGVPGVGVPGVGVPGVGVPGVGVPGVGVPGVGVPGVGVPGVGVPGVGVPGVGVPGVGVPGVGVPGVGVPGVGVPGVGVPGVGVPGVGVPGVGVPGVGVPGVGVPGVGVPGVGVPGVGVPGVGVPGVGVPGVGVPGVGVPGVGVPGVGVPGVGVPGVGVPGVGVPGVGVPGVGVPGVGVPGVGVPGVGVPGVGVPGVGVPGVGVPGVGVPGVGVPGVGVPGVGVPGVGVPGVGVPGVGVPGVGVPGVGVPGVGVPGVGVPGVGVPGVGVPGVGVPGVGVPGVGVPGVGVPGVGVPGVGVPGVGVPGVGVPGVGVPGVGVPGVGVPGVGVPGVGVPGVGVPGVGVPGVGVPGVGVPGVGVPGVGVPGVGVPGVGVPGVGVPGVGVPGVGVPGVGVPGVGVPGVGVPGVGVPGVGVPGVGVPGVGVPGVGVPGVGVPGVGVPGVGVPGVGVPGVGVPGXGVPGVGVPGVGVPGVGVPGVGVPGVGVPGVGVPGVGVPGVGVPGVGVPGVGVPGVGVPGVGVPGVGVPGVGVPGVGVPGVGVPGVGVPGVGVPGVGVPGVGVPGVGVPGVGVPGVGVPGVGVPGVGVPGVGVPGVGVPGVGVPGVGVPGVGVPGVGVPGVGVPGVGVPGVGVPGVGVPGVGVPGVGVPGVGVPGVGVPGVGVPGVGVPGVGVPGVGVPGVGVPGVGVPGVGVPGVGVPGVGVPGVGVPGVGVPGVGVPGVGVPGVGVPGVGVPGVGVPGVGVPGVGVPGVGVPGVGVPGVGVPGVGVPGVGVPGVGVPGVGVPGVGVPGVGVPGVGVPGVGVPGVGVPGVGVPGVGVPGVGVPGVGVPGVGVPGVGVPGVGVPGVGVPGVGVPGVGVPGVGVPGVGVPGVGVPGVGVPGVGVPGVGVPGVGVPGVGVPGVGVPGVGVPGVGVPGVGVPGVGVPGVGVPGVGVPGVGVPGVGVPGVGVPGVGVPGVGVPGVGVPGAGAGSGAGAGSGAGAGSGAGAGSGAGAGSGAGAGSGAGAGSGAGAGSGAGAGSGAGAGSGAGAGSGAGAGSGAGAGSGAGAGSGAGAGSGAGAGSGAGAGSGAGAGSGAGAGSGAGAGSGAGAGSGAGAGSGAGAGSGAGAGSGAGAGSGAGAGSGAGAGSGAGAGSGAGAGSGAGAGSGAGAGSGAGAGSGAGAGSGAGAGSGAGAGSGAGAGSGAGAGSGAGAGSGAGAGSGAGAGSGAGAGSGAGAGSGAGAGSGAGAGSGAGAGSGAGAGSGAGAGSGAGAGSGAGAGSGAGAGSGAGAGSGAGAGSGAGAGSGAGAGSGAGAGSGAGAGSGAGAGSGAGAGSGAGAGSGAGAGSGAGAGSGAGAGSGAGAGSGAGAGSGAGAGSGAGAGSGAGAGSGAGAGSGAGAGSGAGAGSGAGAGSGAGAGSGAGAGSGAGAGSGAGAGSGAGAGSGAGAGSGAGAGSGAGAGSGAGAGSGAGAGSGAGAGSGAGAGSGAGAGSGAGAGSGAGAGSGAGAGSGAGAGSGAGAGSGAGAGSGAGAGSGAGAGSGAGAGSGAGAGSGAGAGSGAGAGSGAGAGSGAGAGSGAGAGSGAGAGSGAGAGSGAGAGSGAGAGSGAGAGSGAGAGSGAGAGSGAGAGSGAGAGSGAGAGSGAGAGSGAGAGSGAGAGSGAGAGSGAGAGSGAGAGSGAGAGSGAGAGSGAGAGSGAGAGSGAGAGSGAGAGSGAGAGSGAGAGSGAGAGSGAGAGSGAGAGSGAGAGSGAGAGSGAGAGSGAGAGSGAGAGSGAGAGSGAGAGSGAGAGSGAGAGSGAGAGSGAGAGSGAGAGSGAGAGSGAGAGSGAGAGSGAGAGSGAGAGSGAGAGSGAGAGSGAGAGSGAGAGSGAGAGSGAGAGSGAGAGSGAGAGSGAGAGSGAGAGSGAGAGSGAGAGSGAGAGSGAGAGSGAGAGSGAGAGSGAGAGSGAGAGSGAGAGSGAGAGSGAGAGSGAGAGSGAGAGSGAGAGSGAGAGSGAGAGSGAGAGSGAGAGSGAGAGSGAGAGSGAGAGSGAGAGSGAGAGSGAGAGSGAGAGSGAGAGSGAGAGSGAGAGSGAGAGSGAGAGSGAGAGSGAGAGSGAGAGSGAGAGSGAGAGSGAGAGSGAGAGSGAGAGSGAGAGSGAGAGSGAGAGSGAGAGSGAGAGSGAGAGSGAGAGSGAGAGSGAGAGSGAGAGSGVGVPGVGVPGVGVPGVGVPGVGVPGVGVPGVGVPGVGVPGVGVPGVGVPGVGVPGVGVPGVGVPGVGVPGVGVPGVGVPGVGVPGVGVPGVGVPGVGVPGVGVPGVGVPGVGVPGVGVPGVGVPGVGVPGVGVPGVGVPGVGVPGVGVPGVGVPGVGVPGVGVPGVGVPGVGVPGVGVPGVGVPGVGVPGVGVPGVGVPGVGVPGVGVPGVGVPGVGVPGVGVPGVGVPGVGVPGVGVPGVGVPGVGVPGVGVPGVGVPGVGVPGVGVPGVGVPGVGVPGVGVPGVGVPGVGVPGVGVPGVGVPGVGVPGVGVPGVGVPGVGVPGVGVPGVGVPGVGVPGVGVPGVGVPGVGVPGVGVPGVGVPGVGVPGVGVPGVGVPGVGVPGVGVPGVGVPGVGVPGVGVPGVGVPGVGVPGVGVPGVGVPGVGVPGVGVPGVGVPGVGVPGVGVPGVGVPGVGVPGVGVPGVGVPGVGVPGVGVPGVGVPGVGVPGVGVPGVGVPGXGVPGVGVPGVGVPGVGVPGVGVPGVGVPGVGVPGVGVPGVGVPGVGVPGVGVPGVGVPGVGVPGVGVPGVGVPGVGVPGVGVPGVGVPGVGVPGVGVPGVGVPGVGVPGVGVPGVGVPGVGVPGVGVPGVGVPGVGVPGVGVPGVGVPGVGVPGVGVPGVGVPGVGVPGVGVPGVGVPGVGVPGVGVPGVGVPGVGVPGVGVPGVGVPGVGVPGVGVPGVGVPGVGVPGVGVPGVGVPGVGVPGVGVPGVGVPGVGVPGVGVPGVGVPGVGVPGVGVPGVGVPGVGVPGVGVPGVGVPGVGVPGVGVPGVGVPGVGVPGVGVPGVGVPGVGVPGVGVPGVGVPGVGVPGVGVPGVGVPGVGVPGVGVPGVGVPGVGVPGVGVPGVGVPGVGVPGVGVPGVGVPGVGVPGVGVPGVGVPGVGVPGVGVPGVGVPGVGVPGVGVPGVGVPGVGVPGVGVPGVGVPGVGVPGVGVPGVGVPGVGVPGVGVPGVGVPGVGVPGVGVPGAGAGSGAGAGSGAGAGSGAGAGSGAGAGSGAGAGSGAGAGSGAGAGSGAGAGSGAGAGSGAGAGSGAGAGSGAGAGSGAGAGSGAGAGSGAGAGSGAGAGSGAGAGSGAGAGSGAGAGSGAGAGSGAGAGSGAGAGSGAGAGSGAGAGSGAGAGSGAGAGSGAGAGSGAGAGSGAGAGSGAGAGSGAGAGSGAGAGSGAGAGSGAGAGSGAGAGSGAGAGSGAGAGSGAGAGSGAGAGSGAGAGSGAGAGSGAGAGSGAGAGSGAGAGSGAGAGSGAGAGSGAGAGSGAGAGSGAGAGSGAGAGSGAGAGSGAGAGSGAGAGSGAGAGSGAGAGSGAGAGSGAGAGSGAGAGSGAGAGSGAGAGSGAGAGSGAGAGSGAGAGSGAGAGSGAGAGSGAGAGSGAGAGSGAGAGSGAGAGSGAGAGSGAGAGSGAGAGSGAGAGSGAGAGSGAGAGSGAGAGSGAGAGSGAGAGSGAGAGSGAGAGSGAGAGSGAGAGSGAGAGSGAGAGSGAGAGSGAGAGSGAGAGSGAGAGSGAGAGSGAGAGSGAGAGSGAGAGSGAGAGSGAGAGSGAGAGSGAGAGSGAGAGSGAGAGSGAGAGSGAGAGSGAGAGSGAGAGSGAGAGSGAGAGSGAGAGSGAGAGSGAGAGSGAGAGSGAGAGSGAGAGSGAGAGSGAGAGSGAGAGSGAGAGSGAGAGSGAGAGSGAGAGSGAGAGSGAGAGSGAGAGSGAGAGSGAGAGSGAGAGSGAGAGSGAGAGSGAGAGSGAGAGSGAGAGSGAGAGSGAGAGSGAGAGSGAGAGSGAGAGSGAGAGSGAGAGSGAGAGSGAGAGSGAGAGSGAGAGSGAGAGSGAGAGSGAGAGSGAGAGSGAGAGSGAGAGSGAGAGSGAGAGSGAGAGSGAGAGSGAGAGSGAGAGSGAGAGSGAGAGSGAGAGSGAGAGSGAGAGSGAGAGSGAGAGSGAGAGSGAGAGSGAGAGSGAGAGSGAGAGSGAGAGSGAGAGSGAGAGSGAGAGSGAGAGSGAGAGSGAGAGSGAGAGSGAGAGSGAGAGSGAGAGSGAGAGSGAGAGSGAGAGSGAGAGSGAGAGSGAGAGSGAGAGSGAGAGSGAGAGSGAGAGSGAGAGSGAGAGSGAGAGSGAGAGSGAGAGSGAGAGSGAGAGSGAGAGSGAGAGSGAGAGSGAGAGSGAGAGSGAGAGSGAGAGSGAGAGSGAGAGSGVGVPGVGVPGVGVPGVGVPGVGVPGVGVPGVGVPGVGVPGVGVPGVGVPGVGVPGVGVPGVGVPGVGVPGVGVPGVGVPGVGVPGVGVPGVGVPGVGVPGVGVPGVGVPGVGVPGVGVPGVGVPGVGVPGVGVPGVGVPGVGVPGVGVPGVGVPGVGVPGVGVPGVGVPGVGVPGVGVPGVGVPGVGVPGVGVPGVGVPGVGVPGVGVPGVGVPGVGVPGVGVPGVGVPGVGVPGVGVPGVGVPGVGVPGVGVPGVGVPGVGVPGVGVPGVGVPGVGVPGVGVPGVGVPGVGVPGVGVPGVGVPGVGVPGVGVPGVGVPGVGVPGVGVPGVGVPGVGVPGVGVPGVGVPGVGVPGVGVPGVGVPGVGVPGVGVPGVGVPGVGVPGVGVPGVGVPGVGVPGVGVPGVGVPGVGVPGVGVPGVGVPGVGVPGVGVPGVGVPGVGVPGVGVPGVGVPGVGVPGVGVPGVGVPGVGVPGVGVPGVGVPGVGVPGVGVPGVGVPGXGVPGVGVPGVGVPGVGVPGVGVPGVGVPGVGVPGVGVPGVGVPGVGVPGVGVPGVGVPGVGVPGVGVPGVGVPGVGVPGVGVPGVGVPGVGVPGVGVPGVGVPGVGVPGVGVPGVGVPGVGVPGVGVPGVGVPGVGVPGVGVPGVGVPGVGVPGVGVPGVGVPGVGVPGVGVPGVGVPGVGVPGVGVPGVGVPGVGVPGVGVPGVGVPGVGVPGVGVPGVGVPGVGVPGVGVPGVGVPGVGVPGVGVPGVGVPGVGVPGVGVPGVGVPGVGVPGVGVPGVGVPGVGVPGVGVPGVGVPGVGVPGVGVPGVGVPGVGVPGVGVPGVGVPGVGVPGVGVPGVGVPGVGVPGVGVPGVGVPGVGVPGVGVPGVGVPGVGVPGVGVPGVGVPGVGVPGVGVPGVGVPGVGVPGVGVPGVGVPGVGVPGVGVPGVGVPGVGVPGVGVPGVGVPGVGVPGVGVPGVGVPGVGVPGVGVPGVGVPGVGVPGVGVPGVGVPGVGVPGVGVPGAGAGSGAGAGSGAGAGSGAGAGSGAGAGSGAGAGSGAGAGSGAGAGSGAGAGSGAGAGSGAGAGSGAGAGSGAGAGSGAGAGSGAGAGSGAGAGSGAGAGSGAGAGSGAGAGSGAGAGSGAGAGSGAGAGSGAGAGSGAGAGSGAGAGSGAGAGSGAGAGSGAGAGSGAGAGSGAGAGSGAGAGSGAGAGSGAGAGSGAGAGSGAGAGSGAGAGSGAGAGSGAGAGSGAGAGSGAGAGSGAGAGSGAGAGSGAGAGSGAGAGSGAGAGSGAGAGSGAGAGSGAGAGSGAGAGSGAGAGSGAGAGSGAGAGSGAGAGSGAGAGSGAGAGSGAGAGSGAGAGSGAGAGSGAGAGSGAGAGSGAGAGSGAGAGSGAGAGSGAGAGSGAGAGSGAGAGSGAGAGSGAGAGSGAGAGSGAGAGSGAGAGSGAGAGSGAGAGSGAGAGSGAGAGSGAGAGSGAGAGSGAGAGSGAGAGSGAGAGSGAGAGSGAGAGSGAGAGSGAGAGSGAGAGSGAGAGSGAGAGSGAGAGSGAGAGSGAGAGSGAGAGSGAGAGSGAGAGSGAGAGSGAGAGSGAGAGSGAGAGSGAGAGSGAGAGSGAGAGSGAGAGSGAGAGSGAGAGSGAGAGSGAGAGSGAGAGSGAGAGSGAGAGSGAGAGSGAGAGSGAGAGSGAGAGSGAGAGSGAGAGSGAGAGSGAGAGSGAGAGSGAGAGSGAGAGSGAGAGSGAGAGSGAGAGSGAGAGSGAGAGSGAGAGSGAGAGSGAGAGSGAGAGSGAGAGSGAGAGSGAGAGSGAGAGSGAGAGSGAGAGSGAGAGSGAGAGSGAGAGSGAGAGSGAGAGSGAGAGSGAGAGSGAGAGSGAGAGSGAGAGSGAGAGSGAGAGSGAGAGSGAGAGSGAGAGSGAGAGSGAGAGSGAGAGSGAGAGSGAGAGSGAGAGSGAGAGSGAGAGSGAGAGSGAGAGSGAGAGSGAGAGSGAGAGSGAGAGSGAGAGSGAGAGSGAGAGSGAGAGSGAGAGSGAGAGSGAGAGSGAGAGSGAGAGSGAGAGSGAGAGSGAGAGSGAGAGSGAGAGSGAGAGSGAGAGSGAGAGSGAGAGSGAGAGSGAGAGSGAGAGSGAGAGSGAGAGSGAGAGSGAGAGSGAGAGSGAGAGSGAGAGSGAGAGSGAGAGSGAGAGSGAGAGSGAGAGSGAGAGSGAGAGSGAGAGSGAGAGSGAGAGSGVGVPGVGVPGVGVPGVGVPGVGVPGVGVPGVGVPGVGVPGVGVPGVGVPGVGVPGVGVPGVGVPGVGVPGVGVPGVGVPGVGVPGVGVPGVGVPGVGVPGVGVPGVGVPGVGVPGVGVPGVGVPGVGVPGVGVPGVGVPGVGVPGVGVPGVGVPGVGVPGVGVPGVGVPGVGVPGVGVPGVGVPGVGVPGVGVPGVGVPGVGVPGVGVPGVGVPGVGVPGVGVPGVGVPGVGVPGVGVPGVGVPGVGVPGVGVPGVGVPGVGVPGVGVPGVGVPGVGVPGVGVPGVGVPGVGVPGVGVPGVGVPGVGVPGVGVPGVGVPGVGVPGVGVPGVGVPGVGVPGVGVPGVGVPGVGVPGVGVPGVGVPGVGVPGVGVPGVGVPGVGVPGVGVPGVGVPGVGVPGVGVPGVGVPGVGVPGVGVPGVGVPGVGVPGVGVPGVGVPGVGVPGVGVPGVGVPGVGVPGVGVPGVGVPGVGVPGVGVPGVGVPGVGVPGVGVPGVGVPGXGVPGVGVPGVGVPGVGVPGVGVPGVGVPGVGVPGVGVPGVGVPGVGVPGVGVPGVGVPGVGVPGVGVPGVGVPGVGVPGVGVPGVGVPGVGVPGVGVPGVGVPGVGVPGVGVPGVGVPGVGVPGVGVPGVGVPGVGVPGVGVPGVGVPGVGVPGVGVPGVGVPGVGVPGVGVPGVGVPGVGVPGVGVPGVGVPGVGVPGVGVPGVGVPGVGVPGVGVPGVGVPGVGVPGVGVPGVGVPGVGVPGVGVPGVGVPGVGVPGVGVPGVGVPGVGVPGVGVPGVGVPGVGVPGVGVPGVGVPGVGVPGVGVPGVGVPGVGVPGVGVPGVGVPGVGVPGVGVPGVGVPGVGVPGVGVPGVGVPGVGVPGVGVPGVGVPGVGVPGVGVPGVGVPGVGVPGVGVPGVGVPGVGVPGVGVPGVGVPGVGVPGVGVPGVGVPGVGVPGVGVPGVGVPGVGVPGVGVPGVGVPGVGVPGVGVPGVGVPGVGVPGVGVPGVGVPGVGVPGVGVPGAGAGSGAGAGSGAGAGSGAGAGSGAGAGSGAGAGSGAGAGSGAGAGSGAGAGSGAGAGSGAGAGSGAGAGSGAGAGSGAGAGSGAGAGSGAGAGSGAGAGSGAGAGSGAGAGSGAGAGSGAGAGSGAGAGSGAGAGSGAGAGSGAGAGSGAGAGSGAGAGSGAGAGSGAGAGSGAGAGSGAGAGSGAGAGSGAGAGSGAGAGSGAGAGSGAGAGSGAGAGSGAGAGSGAGAGSGAGAGSGAGAGSGAGAGSGAGAGSGAGAGSGAGAGSGAGAGSGAGAGSGAGAGSGAGAGSGAGAGSGAGAGSGAGAGSGAGAGSGAGAGSGAGAGSGAGAGSGAGAGSGAGAGSGAGAGSGAGAGSGAGAGSGAGAGSGAGAGSGAGAGSGAGAGSGAGAGSGAGAGSGAGAGSGAGAGSGAGAGSGAGAGSGAGAGSGAGAGSGAGAGSGAGAGSGAGAGSGAGAGSGAGAGSGAGAGSGAGAGSGAGAGSGAGAGSGAGAGSGAGAGSGAGAGSGAGAGSGAGAGSGAGAGSGAGAGSGAGAGSGAGAGSGAGAGSGAGAGSGAGAGSGAGAGSGAGAGSGAGAGSGAGAGSGAGAGSGAGAGSGAGAGSGAGAGSGAGAGSGAGAGSGAGAGSGAGAGSGAGAGSGAGAGSGAGAGSGAGAGSGAGAGSGAGAGSGAGAGSGAGAGSGAGAGSGAGAGSGAGAGSGAGAGSGAGAGSGAGAGSGAGAGSGAGAGSGAGAGSGAGAGSGAGAGSGAGAGSGAGAGSGAGAGSGAGAGSGAGAGSGAGAGSGAGAGSGAGAGSGAGAGSGAGAGSGAGAGSGAGAGSGAGAGSGAGAGSGAGAGSGAGAGSGAGAGSGAGAGSGAGAGSGAGAGSGAGAGSGAGAGSGAGAGSGAGAGSGAGAGSGAGAGSGAGAGSGAGAGSGAGAGSGAGAGSGAGAGSGAGAGSGAGAGSGAGAGSGAGAGSGAGAGSGAGAGSGAGAGSGAGAGSGAGAGSGAGAGSGAGAGSGAGAGSGAGAGSGAGAGSGAGAGSGAGAGSGAGAGSGAGAGSGAGAGSGAGAGSGAGAGSGAGAGSGAGAGSGAGAGSGAGAGSGAGAGSGAGAGSGAGAGSGAGAGSGAGAGSGAGAGSGAGAGSGAGAGSGAGAGSGAGAGSGAGAGSGAGAGSGAGAGSGAGAGSGAGAGSGAGAGSGAGAGSGAGAGSGAGAGSGAGAGSGVGVPGVGVPGVGVPGVGVPGVGVPGVGVPGVGVPGVGVPGVGVPGVGVPGVGVPGVGVPGVGVPGVGVPGVGVPGVGVPGVGVPGVGVPGVGVPGVGVPGVGVPGVGVPGVGVPGVGVPGVGVPGVGVPGVGVPGVGVPGVGVPGVGVPGVGVPGVGVPGVGVPGVGVPGVGVPGVGVPGVGVPGVGVPGVGVPGVGVPGVGVPGVGVPGVGVPGVGVPGVGVPGVGVPGVGVPGVGVPGVGVPGVGVPGVGVPGVGVPGVGVPGVGVPGVGVPGVGVPGVGVPGVGVPGVGVPGVGVPGVGVPGVGVPGVGVPGVGVPGVGVPGVGVPGVGVPGVGVPGVGVPGVGVPGVGVPGVGVPGVGVPGVGVPGVGVPGVGVPGVGVPGVGVPGVGVPGVGVPGVGVPGVGVPGVGVPGVGVPGVGVPGVGVPGVGVPGVGVPGVGVPGVGVPGVGVPGVGVPGVGVPGVGVPGVGVPGVGVPGVGVPGVGVPGVGVPGVGVPGXGVPGVGVPGVGVPGVGVPGVGVPGVGVPGVGVPGVGVPGVGVPGVGVPGVGVPGVGVPGVGVPGVGVPGVGVPGVGVPGVGVPGVGVPGVGVPGVGVPGVGVPGVGVPGVGVPGVGVPGVGVPGVGVPGVGVPGVGVPGVGVPGVGVPGVGVPGVGVPGVGVPGVGVPGVGVPGVGVPGVGVPGVGVPGVGVPGVGVPGVGVPGVGVPGVGVPGVGVPGVGVPGVGVPGVGVPGVGVPGVGVPGVGVPGVGVPGVGVPGVGVPGVGVPGVGVPGVGVPGVGVPGVGVPGVGVPGVGVPGVGVPGVGVPGVGVPGVGVPGVGVPGVGVPGVGVPGVGVPGVGVPGVGVPGVGVPGVGVPGVGVPGVGVPGVGVPGVGVPGVGVPGVGVPGVGVPGVGVPGVGVPGVGVPGVGVPGVGVPGVGVPGVGVPGVGVPGVGVPGVGVPGVGVPGVGVPGVGVPGVGVPGVGVPGVGVPGVGVPGVGVPGVGVPGVGVPGVGVPGVGVPGAGAGSGAGAGSGAGAGSGAGAGSGAGAGSGAGAGSGAGAGSGAGAGSGAGAGSGAGAGSGAGAGSGAGAGSGAGAGSGAGAGSGAGAGSGAGAGSGAGAGSGAGAGSGAGAGSGAGAGSGAGAGSGAGAGSGAGAGSGAGAGSGAGAGSGAGAGSGAGAGSGAGAGSGAGAGSGAGAGSGAGAGSGAGAGSGAGAGSGAGAGSGAGAGSGAGAGSGAGAGSGAGAGSGAGAGSGAGAGSGAGAGSGAGAGSGAGAGSGAGAGSGAGAGSGAGAGSGAGAGSGAGAGSGAGAGSGAGAGSGAGAGSGAGAGSGAGAGSGAGAGSGAGAGSGAGAGSGAGAGSGAGAGSGAGAGSGAGAGSGAGAGSGAGAGSGAGAGSGAGAGSGAGAGSGAGAGSGAGAGSGAGAGSGAGAGSGAGAGSGAGAGSGAGAGSGAGAGSGAGAGSGAGAGSGAGAGSGAGAGSGAGAGSGAGAGSGAGAGSGAGAGSGAGAGSGAGAGSGAGAGSGAGAGSGAGAGSGAGAGSGAGAGSGAGAGSGAGAGSGAGAGSGAGAGSGAGAGSGAGAGSGAGAGSGAGAGSGAGAGSGAGAGSGAGAGSGAGAGSGAGAGSGAGAGSGAGAGSGAGAGSGAGAGSGAGAGSGAGAGSGAGAGSGAGAGSGAGAGSGAGAGSGAGAGSGAGAGSGAGAGSGAGAGSGAGAGSGAGAGSGAGAGSGAGAGSGAGAGSGAGAGSGAGAGSGAGAGSGAGAGSGAGAGSGAGAGSGAGAGSGAGAGSGAGAGSGAGAGSGAGAGSGAGAGSGAGAGSGAGAGSGAGAGSGAGAGSGAGAGSGAGAGSGAGAGSGAGAGSGAGAGSGAGAGSGAGAGSGAGAGSGAGAGSGAGAGSGAGAGSGAGAGSGAGAGSGAGAGSGAGAGSGAGAGSGAGAGSGAGAGSGAGAGSGAGAGSGAGAGSGAGAGSGAGAGSGAGAGSGAGAGSGAGAGSGAGAGSGAGAGSGAGAGSGAGAGSGAGAGSGAGAGSGAGAGSGAGAGSGAGAGSGAGAGSGAGAGSGAGAGSGAGAGSGAGAGSGAGAGSGAGAGSGAGAGSGAGAGSGAGAGSGAGAGSGAGAGSGAGAGSGAGAGSGAGAGSGAGAGSGAGAGSGAGAGSGAGAGSGAGAGSGAGAGSGAGAGSGAGAGSGAGAGSGAGAGSGAGAGSGAGAGSGAGAGSGAGAGSGAGAGSGVGVPGVGVPGVGVPGVGVPGVGVPGVGVPGVGVPGVGVPGVGVPGVGVPGVGVPGVGVPGVGVPGVGVPGVGVPGVGVPGVGVPGVGVPGVGVPGVGVPGVGVPGVGVPGVGVPGVGVPGVGVPGVGVPGVGVPGVGVPGVGVPGVGVPGVGVPGVGVPGVGVPGVGVPGVGVPGVGVPGVGVPGVGVPGVGVPGVGVPGVGVPGVGVPGVGVPGVGVPGVGVPGVGVPGVGVPGVGVPGVGVPGVGVPGVGVPGVGVPGVGVPGVGVPGVGVPGVGVPGVGVPGVGVPGVGVPGVGVPGVGVPGVGVPGVGVPGVGVPGVGVPGVGVPGVGVPGVGVPGVGVPGVGVPGVGVPGVGVPGVGVPGVGVPGVGVPGVGVPGVGVPGVGVPGVGVPGVGVPGVGVPGVGVPGVGVPGVGVPGVGVPGVGVPGVGVPGVGVPGVGVPGVGVPGVGVPGVGVPGVGVPGVGVPGVGVPGVGVPGVGVPGVGVPGVGVPGVGVPGXGVPGVGVPGVGVPGVGVPGVGVPGVGVPGVGVPGVGVPGVGVPGVGVPGVGVPGVGVPGVGVPGVGVPGVGVPGVGVPGVGVPGVGVPGVGVPGVGVPGVGVPGVGVPGVGVPGVGVPGVGVPGVGVPGVGVPGVGVPGVGVPGVGVPGVGVPGVGVPGVGVPGVGVPGVGVPGVGVPGVGVPGVGVPGVGVPGVGVPGVGVPGVGVPGVGVPGVGVPGVGVPGVGVPGVGVPGVGVPGVGVPGVGVPGVGVPGVGVPGVGVPGVGVPGVGVPGVGVPGVGVPGVGVPGVGVPGVGVPGVGVPGVGVPGVGVPGVGVPGVGVPGVGVPGVGVPGVGVPGVGVPGVGVPGVGVPGVGVPGVGVPGVGVPGVGVPGVGVPGVGVPGVGVPGVGVPGVGVPGVGVPGVGVPGVGVPGVGVPGVGVPGVGVPGVGVPGVGVPGVGVPGVGVPGVGVPGVGVPGVGVPGVGVPGVGVPGVGVPGVGVPGVGVPGVGVPGVGVPGVGVPGAGAGSGAGAGSGAGAGSGAGAGSGAGAGSGAGAGSGAGAGSGAGAGSGAGAGSGAGAGSGAGAGSGAGAGSGAGAGSGAGAGSGAGAGSGAGAGSGAGAGSGAGAGSGAGAGSGAGAGSGAGAGSGAGAGSGAGAGSGAGAGSGAGAGSGAGAGSGAGAGSGAGAGSGAGAGSGAGAGSGAGAGSGAGAGSGAGAGSGAGAGSGAGAGSGAGAGSGAGAGSGAGAGSGAGAGSGAGAGSGAGAGSGAGAGSGAGAGSGAGAGSGAGAGSGAGAGSGAGAGSGAGAGSGAGAGSGAGAGSGAGAGSGAGAGSGAGAGSGAGAGSGAGAGSGAGAGSGAGAGSGAGAGSGAGAGSGAGAGSGAGAGSGAGAGSGAGAGSGAGAGSGAGAGSGAGAGSGAGAGSGAGAGSGAGAGSGAGAGSGAGAGSGAGAGSGAGAGSGAGAGSGAGAGSGAGAGSGAGAGSGAGAGSGAGAGSGAGAGSGAGAGSGAGAGSGAGAGSGAGAGSGAGAGSGAGAGSGAGAGSGAGAGSGAGAGSGAGAGSGAGAGSGAGAGSGAGAGSGAGAGSGAGAGSGAGAGSGAGAGSGAGAGSGAGAGSGAGAGSGAGAGSGAGAGSGAGAGSGAGAGSGAGAGSGAGAGSGAGAGSGAGAGSGAGAGSGAGAGSGAGAGSGAGAGSGAGAGSGAGAGSGAGAGSGAGAGSGAGAGSGAGAGSGAGAGSGAGAGSGAGAGSGAGAGSGAGAGSGAGAGSGAGAGSGAGAGSGAGAGSGAGAGSGAGAGSGAGAGSGAGAGSGAGAGSGAGAGSGAGAGSGAGAGSGAGAGSGAGAGSGAGAGSGAGAGSGAGAGSGAGAGSGAGAGSGAGAGSGAGAGSGAGAGSGAGAGSGAGAGSGAGAGSGAGAGSGAGAGSGAGAGSGAGAGSGAGAGSGAGAGSGAGAGSGAGAGSGAGAGSGAGAGSGAGAGSGAGAGSGAGAGSGAGAGSGAGAGSGAGAGSGAGAGSGAGAGSGAGAGSGAGAGSGAGAGSGAGAGSGAGAGSGAGAGSGAGAGSGAGAGSGAGAGSGAGAGSGAGAGSGAGAGSGAGAGSGAGAGSGAGAGSGAGAGSGAGAGSGAGAGSGAGAGSGAGAGSGAGAGSGAGAGSGAGAGSGAGAGSGAGAGSGAGAGSGAGAGSGAGAGSGAGAGSGAGAGSGAGAGSGAGAGSGAGAGSGAGAGSGAGAGSGVGVPGVGVPGVGVPGVGVPGVGVPGVGVPGVGVPGVGVPGVGVPGVGVPGVGVPGVGVPGVGVPGVGVPGVGVPGVGVPGVGVPGVGVPGVGVPGVGVPGVGVPGVGVPGVGVPGVGVPGVGVPGVGVPGVGVPGVGVPGVGVPGVGVPGVGVPGVGVPGVGVPGVGVPGVGVPGVGVPGVGVPGVGVPGVGVPGVGVPGVGVPGVGVPGVGVPGVGVPGVGVPGVGVPGVGVPGVGVPGVGVPGVGVPGVGVPGVGVPGVGVPGVGVPGVGVPGVGVPGVGVPGVGVPGVGVPGVGVPGVGVPGVGVPGVGVPGVGVPGVGVPGVGVPGVGVPGVGVPGVGVPGVGVPGVGVPGVGVPGVGVPGVGVPGVGVPGVGVPGVGVPGVGVPGVGVPGVGVPGVGVPGVGVPGVGVPGVGVPGVGVPGVGVPGVGVPGVGVPGVGVPGVGVPGVGVPGVGVPGVGVPGVGVPGVGVPGVGVPGVGVPGVGVPGVGVPGVGVPGXGVPGVGVPGVGVPGVGVPGVGVPGVGVPGVGVPGVGVPGVGVPGVGVPGVGVPGVGVPGVGVPGVGVPGVGVPGVGVPGVGVPGVGVPGVGVPGVGVPGVGVPGVGVPGVGVPGVGVPGVGVPGVGVPGVGVPGVGVPGVGVPGVGVPGVGVPGVGVPGVGVPGVGVPGVGVPGVGVPGVGVPGVGVPGVGVPGVGVPGVGVPGVGVPGVGVPGVGVPGVGVPGVGVPGVGVPGVGVPGVGVPGVGVPGVGVPGVGVPGVGVPGVGVPGVGVPGVGVPGVGVPGVGVPGVGVPGVGVPGVGVPGVGVPGVGVPGVGVPGVGVPGVGVPGVGVPGVGVPGVGVPGVGVPGVGVPGVGVPGVGVPGVGVPGVGVPGVGVPGVGVPGVGVPGVGVPGVGVPGVGVPGVGVPGVGVPGVGVPGVGVPGVGVPGVGVPGVGVPGVGVPGVGVPGVGVPGVGVPGVGVPGVGVPGVGVPGVGVPGVGVPGVGVPGVGVPGVGVPGVGVPGAGAGSGAGAGSGAGAGSGAGAGSGAGAGSGAGAGSGAGAGSGAGAGSGAGAGSGAGAGSGAGAGSGAGAGSGAGAGSGAGAGSGAGAGSGAGAGSGAGAGSGAGAGSGAGAGSGAGAGSGAGAGSGAGAGSGAGAGSGAGAGSGAGAGSGAGAGSGAGAGSGAGAGSGAGAGSGAGAGSGAGAGSGAGAGSGAGAGSGAGAGSGAGAGSGAGAGSGAGAGSGAGAGSGAGAGSGAGAGSGAGAGSGAGAGSGAGAGSGAGAGSGAGAGSGAGAGSGAGAGSGAGAGSGAGAGSGAGAGSGAGAGSGAGAGSGAGAGSGAGAGSGAGAGSGAGAGSGAGAGSGAGAGSGAGAGSGAGAGSGAGAGSGAGAGSGAGAGSGAGAGSGAGAGSGAGAGSGAGAGSGAGAGSGAGAGSGAGAGSGAGAGSGAGAGSGAGAGSGAGAGSGAGAGSGAGAGSGAGAGSGAGAGSGAGAGSGAGAGSGAGAGSGAGAGSGAGAGSGAGAGSGAGAGSGAGAGSGAGAGSGAGAGSGAGAGSGAGAGSGAGAGSGAGAGSGAGAGSGAGAGSGAGAGSGAGAGSGAGAGSGAGAGSGAGAGSGAGAGSGAGAGSGAGAGSGAGAGSGAGAGSGAGAGSGAGAGSGAGAGSGAGAGSGAGAGSGAGAGSGAGAGSGAGAGSGAGAGSGAGAGSGAGAGSGAGAGSGAGAGSGAGAGSGAGAGSGAGAGSGAGAGSGAGAGSGAGAGSGAGAGSGAGAGSGAGAGSGAGAGSGAGAGSGAGAGSGAGAGSGAGAGSGAGAGSGAGAGSGAGAGSGAGAGSGAGAGSGAGAGSGAGAGSGAGAGSGAGAGSGAGAGSGAGAGSGAGAGSGAGAGSGAGAGSGAGAGSGAGAGSGAGAGSGAGAGSGAGAGSGAGAGSGAGAGSGAGAGSGAGAGSGAGAGSGAGAGSGAGAGSGAGAGSGAGAGSGAGAGSGAGAGSGAGAGSGAGAGSGAGAGSGAGAGSGAGAGSGAGAGSGAGAGSGAGAGSGAGAGSGAGAGSGAGAGSGAGAGSGAGAGSGAGAGSGAGAGSGAGAGSGAGAGSGAGAGSGAGAGSGAGAGSGAGAGSGAGAGSGAGAGSGAGAGSGAGAGSGAGAGSGAGAGSGAGAGSGAGAGSGAGAGSGAGAGSGAGAGSGAGAGSGAGAGSGAGAGSGAGAGSGAGAGSGAGAGSGAGAGSGAGAGSGVGVPGVGVPGVGVPGVGVPGVGVPGVGVPGVGVPGVGVPGVGVPGVGVPGVGVPGVGVPGVGVPGVGVPGVGVPGVGVPGVGVPGVGVPGVGVPGVGVPGVGVPGVGVPGVGVPGVGVPGVGVPGVGVPGVGVPGVGVPGVGVPGVGVPGVGVPGVGVPGVGVPGVGVPGVGVPGVGVPGVGVPGVGVPGVGVPGVGVPGVGVPGVGVPGVGVPGVGVPGVGVPGVGVPGVGVPGVGVPGVGVPGVGVPGVGVPGVGVPGVGVPGVGVPGVGVPGVGVPGVGVPGVGVPGVGVPGVGVPGVGVPGVGVPGVGVPGVGVPGVGVPGVGVPGVGVPGVGVPGVGVPGVGVPGVGVPGVGVPGVGVPGVGVPGVGVPGVGVPGVGVPGVGVPGVGVPGVGVPGVGVPGVGVPGVGVPGVGVPGVGVPGVGVPGVGVPGVGVPGVGVPGVGVPGVGVPGVGVPGVGVPGVGVPGVGVPGVGVPGVGVPGVGVPGVGVPGVGVPGXGVPGVGVPGVGVPGVGVPGVGVPGVGVPGVGVPGVGVPGVGVPGVGVPGVGVPGVGVPGVGVPGVGVPGVGVPGVGVPGVGVPGVGVPGVGVPGVGVPGVGVPGVGVPGVGVPGVGVPGVGVPGVGVPGVGVPGVGVPGVGVPGVGVPGVGVPGVGVPGVGVPGVGVPGVGVPGVGVPGVGVPGVGVPGVGVPGVGVPGVGVPGVGVPGVGVPGVGVPGVGVPGVGVPGVGVPGVGVPGVGVPGVGVPGVGVPGVGVPGVGVPGVGVPGVGVPGVGVPGVGVPGVGVPGVGVPGVGVPGVGVPGVGVPGVGVPGVGVPGVGVPGVGVPGVGVPGVGVPGVGVPGVGVPGVGVPGVGVPGVGVPGVGVPGVGVPGVGVPGVGVPGVGVPGVGVPGVGVPGVGVPGVGVPGVGVPGVGVPGVGVPGVGVPGVGVPGVGVPGVGVPGVGVPGVGVPGVGVPGVGVPGVGVPGVGVPGVGVPGVGVPGVGVPGVGVPGVGVPGVGVPGAGAGSGAGAGSGAGAGSGAGAGSGAGAGSGAGAGSGAGAGSGAGAGSGAGAGSGAGAGSGAGAGSGAGAGSGAGAGSGAGAGSGAGAGSGAGAGSGAGAGSGAGAGSGAGAGSGAGAGSGAGAGSGAGAGSGAGAGSGAGAGSGAGAGSGAGAGSGAGAGSGAGAGSGAGAGSGAGAGSGAGAGSGAGAGSGAGAGSGAGAGSGAGAGSGAGAGSGAGAGSGAGAGSGAGAGSGAGAGSGAGAGSGAGAGSGAGAGSGAGAGSGAGAGSGAGAGSGAGAGSGAGAGSGAGAGSGAGAGSGAGAGSGAGAGSGAGAGSGAGAGSGAGAGSGAGAGSGAGAGSGAGAGSGAGAGSGAGAGSGAGAGSGAGAGSGAGAGSGAGAGSGAGAGSGAGAGSGAGAGSGAGAGSGAGAGSGAGAGSGAGAGSGAGAGSGAGAGSGAGAGSGAGAGSGAGAGSGAGAGSGAGAGSGAGAGSGAGAGSGAGAGSGAGAGSGAGAGSGAGAGSGAGAGSGAGAGSGAGAGSGAGAGSGAGAGSGAGAGSGAGAGSGAGAGSGAGAGSGAGAGSGAGAGSGAGAGSGAGAGSGAGAGSGAGAGSGAGAGSGAGAGSGAGAGSGAGAGSGAGAGSGAGAGSGAGAGSGAGAGSGAGAGSGAGAGSGAGAGSGAGAGSGAGAGSGAGAGSGAGAGSGAGAGSGAGAGSGAGAGSGAGAGSGAGAGSGAGAGSGAGAGSGAGAGSGAGAGSGAGAGSGAGAGSGAGAGSGAGAGSGAGAGSGAGAGSGAGAGSGAGAGSGAGAGSGAGAGSGAGAGSGAGAGSGAGAGSGAGAGSGAGAGSGAGAGSGAGAGSGAGAGSGAGAGSGAGAGSGAGAGSGAGAGSGAGAGSGAGAGSGAGAGSGAGAGSGAGAGSGAGAGSGAGAGSGAGAGSGAGAGSGAGAGSGAGAGSGAGAGSGAGAGSGAGAGSGAGAGSGAGAGSGAGAGSGAGAGSGAGAGSGAGAGSGAGAGSGAGAGSGAGAGSGAGAGSGAGAGSGAGAGSGAGAGSGAGAGSGAGAGSGAGAGSGAGAGSGAGAGSGAGAGSGAGAGSGAGAGSGAGAGSGAGAGSGAGAGSGAGAGSGAGAGSGAGAGSGAGAGSGAGAGSGAGAGSGAGAGSGAGAGSGAGAGSGAGAGSGAGAGSGAGAGSGAGAGSGAGAGSGAGAGSGAGAGSGAGAGSGAGAGSGVGVPGVGVPGVGVPGVGVPGVGVPGVGVPGVGVPGVGVPGVGVPGVGVPGVGVPGVGVPGVGVPGVGVPGVGVPGVGVPGVGVPGVGVPGVGVPGVGVPGVGVPGVGVPGVGVPGVGVPGVGVPGVGVPGVGVPGVGVPGVGVPGVGVPGVGVPGVGVPGVGVPGVGVPGVGVPGVGVPGVGVPGVGVPGVGVPGVGVPGVGVPGVGVPGVGVPGVGVPGVGVPGVGVPGVGVPGVGVPGVGVPGVGVPGVGVPGVGVPGVGVPGVGVPGVGVPGVGVPGVGVPGVGVPGVGVPGVGVPGVGVPGVGVPGVGVPGVGVPGVGVPGVGVPGVGVPGVGVPGVGVPGVGVPGVGVPGVGVPGVGVPGVGVPGVGVPGVGVPGVGVPGVGVPGVGVPGVGVPGVGVPGVGVPGVGVPGVGVPGVGVPGVGVPGVGVPGVGVPGVGVPGVGVPGVGVPGVGVPGVGVPGVGVPGVGVPGVGVPGVGVPGVGVPGVGVPGVGVPGXGVPGVGVPGVGVPGVGVPGVGVPGVGVPGVGVPGVGVPGVGVPGVGVPGVGVPGVGVPGVGVPGVGVPGVGVPGVGVPGVGVPGVGVPGVGVPGVGVPGVGVPGVGVPGVGVPGVGVPGVGVPGVGVPGVGVPGVGVPGVGVPGVGVPGVGVPGVGVPGVGVPGVGVPGVGVPGVGVPGVGVPGVGVPGVGVPGVGVPGVGVPGVGVPGVGVPGVGVPGVGVPGVGVPGVGVPGVGVPGVGVPGVGVPGVGVPGVGVPGVGVPGVGVPGVGVPGVGVPGVGVPGVGVPGVGVPGVGVPGVGVPGVGVPGVGVPGVGVPGVGVPGVGVPGVGVPGVGVPGVGVPGVGVPGVGVPGVGVPGVGVPGVGVPGVGVPGVGVPGVGVPGVGVPGVGVPGVGVPGVGVPGVGVPGVGVPGVGVPGVGVPGVGVPGVGVPGVGVPGVGVPGVGVPGVGVPGVGVPGVGVPGVGVPGVGVPGVGVPGVGVPGVGVPGVGVPGVGVPGVGVPGAGAGSGAGAGSGAGAGSGAGAGSGAGAGSGAGAGSGAGAGSGAGAGSGAGAGSGAGAGSGAGAGSGAGAGSGAGAGSGAGAGSGAGAGSGAGAGSGAGAGSGAGAGSGAGAGSGAGAGSGAGAGSGAGAGSGAGAGSGAGAGSGAGAGSGAGAGSGAGAGSGAGAGSGAGAGSGAGAGSGAGAGSGAGAGSGAGAGSGAGAGSGAGAGSGAGAGSGAGAGSGAGAGSGAGAGSGAGAGSGAGAGSGAGAGSGAGAGSGAGAGSGAGAGSGAGAGSGAGAGSGAGAGSGAGAGSGAGAGSGAGAGSGAGAGSGAGAGSGAGAGSGAGAGSGAGAGSGAGAGSGAGAGSGAGAGSGAGAGSGAGAGSGAGAGSGAGAGSGAGAGSGAGAGSGAGAGSGAGAGSGAGAGSGAGAGSGAGAGSGAGAGSGAGAGSGAGAGSGAGAGSGAGAGSGAGAGSGAGAGSGAGAGSGAGAGSGAGAGSGAGAGSGAGAGSGAGAGSGAGAGSGAGAGSGAGAGSGAGAGSGAGAGSGAGAGSGAGAGSGAGAGSGAGAGSGAGAGSGAGAGSGAGAGSGAGAGSGAGAGSGAGAGSGAGAGSGAGAGSGAGAGSGAGAGSGAGAGSGAGAGSGAGAGSGAGAGSGAGAGSGAGAGSGAGAGSGAGAGSGAGAGSGAGAGSGAGAGSGAGAGSGAGAGSGAGAGSGAGAGSGAGAGSGAGAGSGAGAGSGAGAGSGAGAGSGAGAGSGAGAGSGAGAGSGAGAGSGAGAGSGAGAGSGAGAGSGAGAGSGAGAGSGAGAGSGAGAGSGAGAGSGAGAGSGAGAGSGAGAGSGAGAGSGAGAGSGAGAGSGAGAGSGAGAGSGAGAGSGAGAGSGAGAGSGAGAGSGAGAGSGAGAGSGAGAGSGAGAGSGAGAGSGAGAGSGAGAGSGAGAGSGAGAGSGAGAGSGAGAGSGAGAGSGAGAGSGAGAGSGAGAGSGAGAGSGAGAGSGAGAGSGAGAGSGAGAGSGAGAGSGAGAGSGAGAGSGAGAGSGAGAGSGAGAGSGAGAGSGAGAGSGAGAGSGAGAGSGAGAGSGAGAGSGAGAGSGAGAGSGAGAGSGAGAGSGAGAGSGAGAGSGAGAGSGAGAGSGAGAGSGAGAGSGAGAGSGAGAGSGAGAGSGAGAGSGAGAGSGAGAGSGAGAGSGAGAGSGAGAGSGAGAGSGAGAGSGAGAGSGAGAGSGVGVPGVGVPGVGVPGVGVPGVGVPGVGVPGVGVPGVGVPGVGVPGVGVPGVGVPGVGVPGVGVPGVGVPGVGVPGVGVPGVGVPGVGVPGVGVPGVGVPGVGVPGVGVPGVGVPGVGVPGVGVPGVGVPGVGVPGVGVPGVGVPGVGVPGVGVPGVGVPGVGVPGVGVPGVGVPGVGVPGVGVPGVGVPGVGVPGVGVPGVGVPGVGVPGVGVPGVGVPGVGVPGVGVPGVGVPGVGVPGVGVPGVGVPGVGVPGVGVPGVGVPGVGVPGVGVPGVGVPGVGVPGVGVPGVGVPGVGVPGVGVPGVGVPGVGVPGVGVPGVGVPGVGVPGVGVPGVGVPGVGVPGVGVPGVGVPGVGVPGVGVPGVGVPGVGVPGVGVPGVGVPGVGVPGVGVPGVGVPGVGVPGVGVPGVGVPGVGVPGVGVPGVGVPGVGVPGVGVPGVGVPGVGVPGVGVPGVGVPGVGVPGVGVPGVGVPGVGVPGVGVPGVGVPGVGVPGVGVPGXGVPGVGVPGVGVPGVGVPGVGVPGVGVPGVGVPGVGVPGVGVPGVGVPGVGVPGVGVPGVGVPGVGVPGVGVPGVGVPGVGVPGVGVPGVGVPGVGVPGVGVPGVGVPGVGVPGVGVPGVGVPGVGVPGVGVPGVGVPGVGVPGVGVPGVGVPGVGVPGVGVPGVGVPGVGVPGVGVPGVGVPGVGVPGVGVPGVGVPGVGVPGVGVPGVGVPGVGVPGVGVPGVGVPGVGVPGVGVPGVGVPGVGVPGVGVPGVGVPGVGVPGVGVPGVGVPGVGVPGVGVPGVGVPGVGVPGVGVPGVGVPGVGVPGVGVPGVGVPGVGVPGVGVPGVGVPGVGVPGVGVPGVGVPGVGVPGVGVPGVGVPGVGVPGVGVPGVGVPGVGVPGVGVPGVGVPGVGVPGVGVPGVGVPGVGVPGVGVPGVGVPGVGVPGVGVPGVGVPGVGVPGVGVPGVGVPGVGVPGVGVPGVGVPGVGVPGVGVPGVGVPGVGVPGVGVPGVGVPGVGVPGAGAGSGAGAGSGAGAGSGAGAGSGAGAGSGAGAGSGAGAGSGAGAGSGAGAGSGAGAGSGAGAGSGAGAGSGAGAGSGAGAGSGAGAGSGAGAGSGAGAGSGAGAGSGAGAGSGAGAGSGAGAGSGAGAGSGAGAGSGAGAGSGAGAGSGAGAGSGAGAGSGAGAGSGAGAGSGAGAGSGAGAGSGAGAGSGAGAGSGAGAGSGAGAGSGAGAGSGAGAGSGAGAGSGAGAGSGAGAGSGAGAGSGAGAGSGAGAGSGAGAGSGAGAGSGAGAGSGAGAGSGAGAGSGAGAGSGAGAGSGAGAGSGAGAGSGAGAGSGAGAGSGAGAGSGAGAGSGAGAGSGAGAGSGAGAGSGAGAGSGAGAGSGAGAGSGAGAGSGAGAGSGAGAGSGAGAGSGAGAGSGAGAGSGAGAGSGAGAGSGAGAGSGAGAGSGAGAGSGAGAGSGAGAGSGAGAGSGAGAGSGAGAGSGAGAGSGAGAGSGAGAGSGAGAGSGAGAGSGAGAGSGAGAGSGAGAGSGAGAGSGAGAGSGAGAGSGAGAGSGAGAGSGAGAGSGAGAGSGAGAGSGAGAGSGAGAGSGAGAGSGAGAGSGAGAGSGAGAGSGAGAGSGAGAGSGAGAGSGAGAGSGAGAGSGAGAGSGAGAGSGAGAGSGAGAGSGAGAGSGAGAGSGAGAGSGAGAGSGAGAGSGAGAGSGAGAGSGAGAGSGAGAGSGAGAGSGAGAGSGAGAGSGAGAGSGAGAGSGAGAGSGAGAGSGAGAGSGAGAGSGAGAGSGAGAGSGAGAGSGAGAGSGAGAGSGAGAGSGAGAGSGAGAGSGAGAGSGAGAGSGAGAGSGAGAGSGAGAGSGAGAGSGAGAGSGAGAGSGAGAGSGAGAGSGAGAGSGAGAGSGAGAGSGAGAGSGAGAGSGAGAGSGAGAGSGAGAGSGAGAGSGAGAGSGAGAGSGAGAGSGAGAGSGAGAGSGAGAGSGAGAGSGAGAGSGAGAGSGAGAGSGAGAGSGAGAGSGAGAGSGAGAGSGAGAGSGAGAGSGAGAGSGAGAGSGAGAGSGAGAGSGAGAGSGAGAGSGAGAGSGAGAGSGAGAGSGAGAGSGAGAGSGAGAGSGAGAGSGAGAGSGAGAGSGAGAGSGAGAGSGAGAGSGAGAGSGAGAGSGAGAGSGAGAGSGAGAGSGAGAGSGAGAGSGAGAGSGAGAGSGAGAGSGAGAGSGAGAGSGAGAGSGVGVPGVGVPGVGVPGVGVPGVGVPGVGVPGVGVPGVGVPGVGVPGVGVPGVGVPGVGVPGVGVPGVGVPGVGVPGVGVPGVGVPGVGVPGVGVPGVGVPGVGVPGVGVPGVGVPGVGVPGVGVPGVGVPGVGVPGVGVPGVGVPGVGVPGVGVPGVGVPGVGVPGVGVPGVGVPGVGVPGVGVPGVGVPGVGVPGVGVPGVGVPGVGVPGVGVPGVGVPGVGVPGVGVPGVGVPGVGVPGVGVPGVGVPGVGVPGVGVPGVGVPGVGVPGVGVPGVGVPGVGVPGVGVPGVGVPGVGVPGVGVPGVGVPGVGVPGVGVPGVGVPGVGVPGVGVPGVGVPGVGVPGVGVPGVGVPGVGVPGVGVPGVGVPGVGVPGVGVPGVGVPGVGVPGVGVPGVGVPGVGVPGVGVPGVGVPGVGVPGVGVPGVGVPGVGVPGVGVPGVGVPGVGVPGVGVPGVGVPGVGVPGVGVPGVGVPGVGVPGVGVPGVGVPGVGVPGVGVPGXGVPGVGVPGVGVPGVGVPGVGVPGVGVPGVGVPGVGVPGVGVPGVGVPGVGVPGVGVPGVGVPGVGVPGVGVPGVGVPGVGVPGVGVPGVGVPGVGVPGVGVPGVGVPGVGVPGVGVPGVGVPGVGVPGVGVPGVGVPGVGVPGVGVPGVGVPGVGVPGVGVPGVGVPGVGVPGVGVPGVGVPGVGVPGVGVPGVGVPGVGVPGVGVPGVGVPGVGVPGVGVPGVGVPGVGVPGVGVPGVGVPGVGVPGVGVPGVGVPGVGVPGVGVPGVGVPGVGVPGVGVPGVGVPGVGVPGVGVPGVGVPGVGVPGVGVPGVGVPGVGVPGVGVPGVGVPGVGVPGVGVPGVGVPGVGVPGVGVPGVGVPGVGVPGVGVPGVGVPGVGVPGVGVPGVGVPGVGVPGVGVPGVGVPGVGVPGVGVPGVGVPGVGVPGVGVPGVGVPGVGVPGVGVPGVGVPGVGVPGVGVPGVGVPGVGVPGVGVPGVGVPGVGVPGVGVPGVGVPGVGVPGAGAGSGAGAGSGAGAGSGAGAGSGAGAGSGAGAGSGAGAGSGAGAGSGAGAGSGAGAGSGAGAGSGAGAGSGAGAGSGAGAGSGAGAGSGAGAGSGAGAGSGAGAGSGAGAGSGAGAGSGAGAGSGAGAGSGAGAGSGAGAGSGAGAGSGAGAGSGAGAGSGAGAGSGAGAGSGAGAGSGAGAGSGAGAGSGAGAGSGAGAGSGAGAGSGAGAGSGAGAGSGAGAGSGAGAGSGAGAGSGAGAGSGAGAGSGAGAGSGAGAGSGAGAGSGAGAGSGAGAGSGAGAGSGAGAGSGAGAGSGAGAGSGAGAGSGAGAGSGAGAGSGAGAGSGAGAGSGAGAGSGAGAGSGAGAGSGAGAGSGAGAGSGAGAGSGAGAGSGAGAGSGAGAGSGAGAGSGAGAGSGAGAGSGAGAGSGAGAGSGAGAGSGAGAGSGAGAGSGAGAGSGAGAGSGAGAGSGAGAGSGAGAGSGAGAGSGAGAGSGAGAGSGAGAGSGAGAGSGAGAGSGAGAGSGAGAGSGAGAGSGAGAGSGAGAGSGAGAGSGAGAGSGAGAGSGAGAGSGAGAGSGAGAGSGAGAGSGAGAGSGAGAGSGAGAGSGAGAGSGAGAGSGAGAGSGAGAGSGAGAGSGAGAGSGAGAGSGAGAGSGAGAGSGAGAGSGAGAGSGAGAGSGAGAGSGAGAGSGAGAGSGAGAGSGAGAGSGAGAGSGAGAGSGAGAGSGAGAGSGAGAGSGAGAGSGAGAGSGAGAGSGAGAGSGAGAGSGAGAGSGAGAGSGAGAGSGAGAGSGAGAGSGAGAGSGAGAGSGAGAGSGAGAGSGAGAGSGAGAGSGAGAGSGAGAGSGAGAGSGAGAGSGAGAGSGAGAGSGAGAGSGAGAGSGAGAGSGAGAGSGAGAGSGAGAGSGAGAGSGAGAGSGAGAGSGAGAGSGAGAGSGAGAGSGAGAGSGAGAGSGAGAGSGAGAGSGAGAGSGAGAGSGAGAGSGAGAGSGAGAGSGAGAGSGAGAGSGAGAGSGAGAGSGAGAGSGAGAGSGAGAGSGAGAGSGAGAGSGAGAGSGAGAGSGAGAGSGAGAGSGAGAGSGAGAGSGAGAGSGAGAGSGAGAGSGAGAGSGAGAGSGAGAGSGAGAGSGAGAGSGAGAGSGAGAGSGAGAGSGAGAGSGAGAGSGAGAGSGAGAGSGAGAGSGAGAGSGAGAGSGAGAGSGAGAGSGAGAGSGAGAGSGVGVPGVGVPGVGVPGVGVPGVGVPGVGVPGVGVPGVGVPGVGVPGVGVPGVGVPGVGVPGVGVPGVGVPGVGVPGVGVPGVGVPGVGVPGVGVPGVGVPGVGVPGVGVPGVGVPGVGVPGVGVPGVGVPGVGVPGVGVPGVGVPGVGVPGVGVPGVGVPGVGVPGVGVPGVGVPGVGVPGVGVPGVGVPGVGVPGVGVPGVGVPGVGVPGVGVPGVGVPGVGVPGVGVPGVGVPGVGVPGVGVPGVGVPGVGVPGVGVPGVGVPGVGVPGVGVPGVGVPGVGVPGVGVPGVGVPGVGVPGVGVPGVGVPGVGVPGVGVPGVGVPGVGVPGVGVPGVGVPGVGVPGVGVPGVGVPGVGVPGVGVPGVGVPGVGVPGVGVPGVGVPGVGVPGVGVPGVGVPGVGVPGVGVPGVGVPGVGVPGVGVPGVGVPGVGVPGVGVPGVGVPGVGVPGVGVPGVGVPGVGVPGVGVPGVGVPGVGVPGVGVPGVGVPGVGVPGVGVPGXGVPGVGVPGVGVPGVGVPGVGVPGVGVPGVGVPGVGVPGVGVPGVGVPGVGVPGVGVPGVGVPGVGVPGVGVPGVGVPGVGVPGVGVPGVGVPGVGVPGVGVPGVGVPGVGVPGVGVPGVGVPGVGVPGVGVPGVGVPGVGVPGVGVPGVGVPGVGVPGVGVPGVGVPGVGVPGVGVPGVGVPGVGVPGVGVPGVGVPGVGVPGVGVPGVGVPGVGVPGVGVPGVGVPGVGVPGVGVPGVGVPGVGVPGVGVPGVGVPGVGVPGVGVPGVGVPGVGVPGVGVPGVGVPGVGVPGVGVPGVGVPGVGVPGVGVPGVGVPGVGVPGVGVPGVGVPGVGVPGVGVPGVGVPGVGVPGVGVPGVGVPGVGVPGVGVPGVGVPGVGVPGVGVPGVGVPGVGVPGVGVPGVGVPGVGVPGVGVPGVGVPGVGVPGVGVPGVGVPGVGVPGVGVPGVGVPGVGVPGVGVPGVGVPGVGVPGVGVPGVGVPGVGVPGVGVPGVGVPGVGVPGAGAGSGAGAGSGAGAGSGAGAGSGAGAGSGAGAGSGAGAGSGAGAGSGAGAGSGAGAGSGAGAGSGAGAGSGAGAGSGAGAGSGAGAGSGAGAGSGAGAGSGAGAGSGAGAGSGAGAGSGAGAGSGAGAGSGAGAGSGAGAGSGAGAGSGAGAGSGAGAGSGAGAGSGAGAGSGAGAGSGAGAGSGAGAGSGAGAGSGAGAGSGAGAGSGAGAGSGAGAGSGAGAGSGAGAGSGAGAGSGAGAGSGAGAGSGAGAGSGAGAGSGAGAGSGAGAGSGAGAGSGAGAGSGAGAGSGAGAGSGAGAGSGAGAGSGAGAGSGAGAGSGAGAGSGAGAGSGAGAGSGAGAGSGAGAGSGAGAGSGAGAGSGAGAGSGAGAGSGAGAGSGAGAGSGAGAGSGAGAGSGAGAGSGAGAGSGAGAGSGAGAGSGAGAGSGAGAGSGAGAGSGAGAGSGAGAGSGAGAGSGAGAGSGAGAGSGAGAGSGAGAGSGAGAGSGAGAGSGAGAGSGAGAGSGAGAGSGAGAGSGAGAGSGAGAGSGAGAGSGAGAGSGAGAGSGAGAGSGAGAGSGAGAGSGAGAGSGAGAGSGAGAGSGAGAGSGAGAGSGAGAGSGAGAGSGAGAGSGAGAGSGAGAGSGAGAGSGAGAGSGAGAGSGAGAGSGAGAGSGAGAGSGAGAGSGAGAGSGAGAGSGAGAGSGAGAGSGAGAGSGAGAGSGAGAGSGAGAGSGAGAGSGAGAGSGAGAGSGAGAGSGAGAGSGAGAGSGAGAGSGAGAGSGAGAGSGAGAGSGAGAGSGAGAGSGAGAGSGAGAGSGAGAGSGAGAGSGAGAGSGAGAGSGAGAGSGAGAGSGAGAGSGAGAGSGAGAGSGAGAGSGAGAGSGAGAGSGAGAGSGAGAGSGAGAGSGAGAGSGAGAGSGAGAGSGAGAGSGAGAGSGAGAGSGAGAGSGAGAGSGAGAGSGAGAGSGAGAGSGAGAGSGAGAGSGAGAGSGAGAGSGAGAGSGAGAGSGAGAGSGAGAGSGAGAGSGAGAGSGAGAGSGAGAGSGAGAGSGAGAGSGAGAGSGAGAGSGAGAGSGAGAGSGAGAGSGAGAGSGAGAGSGAGAGSGAGAGSGAGAGSGAGAGSGAGAGSGAGAGSGAGAGSGAGAGSGAGAGSGAGAGSGAGAGSGAGAGSGAGAGSGAGAGSGAGAGSGAGAGSGAGAGSGAGAGSGAGAGSGAGAGSGVGVPGVGVPGVGVPGVGVPGVGVPGVGVPGVGVPGVGVPGVGVPGVGVPGVGVPGVGVPGVGVPGVGVPGVGVPGVGVPGVGVPGVGVPGVGVPGVGVPGVGVPGVGVPGVGVPGVGVPGVGVPGVGVPGVGVPGVGVPGVGVPGVGVPGVGVPGVGVPGVGVPGVGVPGVGVPGVGVPGVGVPGVGVPGVGVPGVGVPGVGVPGVGVPGVGVPGVGVPGVGVPGVGVPGVGVPGVGVPGVGVPGVGVPGVGVPGVGVPGVGVPGVGVPGVGVPGVGVPGVGVPGVGVPGVGVPGVGVPGVGVPGVGVPGVGVPGVGVPGVGVPGVGVPGVGVPGVGVPGVGVPGVGVPGVGVPGVGVPGVGVPGVGVPGVGVPGVGVPGVGVPGVGVPGVGVPGVGVPGVGVPGVGVPGVGVPGVGVPGVGVPGVGVPGVGVPGVGVPGVGVPGVGVPGVGVPGVGVPGVGVPGVGVPGVGVPGVGVPGVGVPGVGVPGVGVPGVGVPGXGVPGVGVPGVGVPGVGVPGVGVPGVGVPGVGVPGVGVPGVGVPGVGVPGVGVPGVGVPGVGVPGVGVPGVGVPGVGVPGVGVPGVGVPGVGVPGVGVPGVGVPGVGVPGVGVPGVGVPGVGVPGVGVPGVGVPGVGVPGVGVPGVGVPGVGVPGVGVPGVGVPGVGVPGVGVPGVGVPGVGVPGVGVPGVGVPGVGVPGVGVPGVGVPGVGVPGVGVPGVGVPGVGVPGVGVPGVGVPGVGVPGVGVPGVGVPGVGVPGVGVPGVGVPGVGVPGVGVPGVGVPGVGVPGVGVPGVGVPGVGVPGVGVPGVGVPGVGVPGVGVPGVGVPGVGVPGVGVPGVGVPGVGVPGVGVPGVGVPGVGVPGVGVPGVGVPGVGVPGVGVPGVGVPGVGVPGVGVPGVGVPGVGVPGVGVPGVGVPGVGVPGVGVPGVGVPGVGVPGVGVPGVGVPGVGVPGVGVPGVGVPGVGVPGVGVPGVGVPGVGVPGVGVPGVGVPGVGVPGVGVPGAGAGSGAGAGSGAGAGSGAGAGSGAGAGSGAGAGSGAGAGSGAGAGSGAGAGSGAGAGSGAGAGSGAGAGSGAGAGSGAGAGSGAGAGSGAGAGSGAGAGSGAGAGSGAGAGSGAGAGSGAGAGSGAGAGSGAGAGSGAGAGSGAGAGSGAGAGSGAGAGSGAGAGSGAGAGSGAGAGSGAGAGSGAGAGSGAGAGSGAGAGSGAGAGSGAGAGSGAGAGSGAGAGSGAGAGSGAGAGSGAGAGSGAGAGSGAGAGSGAGAGSGAGAGSGAGAGSGAGAGSGAGAGSGAGAGSGAGAGSGAGAGSGAGAGSGAGAGSGAGAGSGAGAGSGAGAGSGAGAGSGAGAGSGAGAGSGAGAGSGAGAGSGAGAGSGAGAGSGAGAGSGAGAGSGAGAGSGAGAGSGAGAGSGAGAGSGAGAGSGAGAGSGAGAGSGAGAGSGAGAGSGAGAGSGAGAGSGAGAGSGAGAGSGAGAGSGAGAGSGAGAGSGAGAGSGAGAGSGAGAGSGAGAGSGAGAGSGAGAGSGAGAGSGAGAGSGAGAGSGAGAGSGAGAGSGAGAGSGAGAGSGAGAGSGAGAGSGAGAGSGAGAGSGAGAGSGAGAGSGAGAGSGAGAGSGAGAGSGAGAGSGAGAGSGAGAGSGAGAGSGAGAGSGAGAGSGAGAGSGAGAGSGAGAGSGAGAGSGAGAGSGAGAGSGAGAGSGAGAGSGAGAGSGAGAGSGAGAGSGAGAGSGAGAGSGAGAGSGAGAGSGAGAGSGAGAGSGAGAGSGAGAGSGAGAGSGAGAGSGAGAGSGAGAGSGAGAGSGAGAGSGAGAGSGAGAGSGAGAGSGAGAGSGAGAGSGAGAGSGAGAGSGAGAGSGAGAGSGAGAGSGAGAGSGAGAGSGAGAGSGAGAGSGAGAGSGAGAGSGAGAGSGAGAGSGAGAGSGAGAGSGAGAGSGAGAGSGAGAGSGAGAGSGAGAGSGAGAGSGAGAGSGAGAGSGAGAGSGAGAGSGAGAGSGAGAGSGAGAGSGAGAGSGAGAGSGAGAGSGAGAGSGAGAGSGAGAGSGAGAGSGAGAGSGAGAGSGAGAGSGAGAGSGAGAGSGAGAGSGAGAGSGAGAGSGAGAGSGAGAGSGAGAGSGAGAGSGAGAGSGAGAGSGAGAGSGAGAGSGAGAGSGAGAGSGAGAGSGAGAGSGAGAGSGAGAGSGAGAGSGAGAGSGAGAGSGAGAGSGAGAGSGVGVPGVGVPGVGVPGVGVPGVGVPGVGVPGVGVPGVGVPGVGVPGVGVPGVGVPGVGVPGVGVPGVGVPGVGVPGVGVPGVGVPGVGVPGVGVPGVGVPGVGVPGVGVPGVGVPGVGVPGVGVPGVGVPGVGVPGVGVPGVGVPGVGVPGVGVPGVGVPGVGVPGVGVPGVGVPGVGVPGVGVPGVGVPGVGVPGVGVPGVGVPGVGVPGVGVPGVGVPGVGVPGVGVPGVGVPGVGVPGVGVPGVGVPGVGVPGVGVPGVGVPGVGVPGVGVPGVGVPGVGVPGVGVPGVGVPGVGVPGVGVPGVGVPGVGVPGVGVPGVGVPGVGVPGVGVPGVGVPGVGVPGVGVPGVGVPGVGVPGVGVPGVGVPGVGVPGVGVPGVGVPGVGVPGVGVPGVGVPGVGVPGVGVPGVGVPGVGVPGVGVPGVGVPGVGVPGVGVPGVGVPGVGVPGVGVPGVGVPGVGVPGVGVPGVGVPGVGVPGVGVPGVGVPGVGVPGVGVPGXGVPGVGVPGVGVPGVGVPGVGVPGVGVPGVGVPGVGVPGVGVPGVGVPGVGVPGVGVPGVGVPGVGVPGVGVPGVGVPGVGVPGVGVPGVGVPGVGVPGVGVPGVGVPGVGVPGVGVPGVGVPGVGVPGVGVPGVGVPGVGVPGVGVPGVGVPGVGVPGVGVPGVGVPGVGVPGVGVPGVGVPGVGVPGVGVPGVGVPGVGVPGVGVPGVGVPGVGVPGVGVPGVGVPGVGVPGVGVPGVGVPGVGVPGVGVPGVGVPGVGVPGVGVPGVGVPGVGVPGVGVPGVGVPGVGVPGVGVPGVGVPGVGVPGVGVPGVGVPGVGVPGVGVPGVGVPGVGVPGVGVPGVGVPGVGVPGVGVPGVGVPGVGVPGVGVPGVGVPGVGVPGVGVPGVGVPGVGVPGVGVPGVGVPGVGVPGVGVPGVGVPGVGVPGVGVPGVGVPGVGVPGVGVPGVGVPGVGVPGVGVPGVGVPGVGVPGVGVPGVGVPGVGVPGVGVPGVGVPGVGVPGAGAGSGAGAGSGAGAGSGAGAGSGAGAGSGAGAGSGAGAGSGAGAGSGAGAGSGAGAGSGAGAGSGAGAGSGAGAGSGAGAGSGAGAGSGAGAGSGAGAGSGAGAGSGAGAGSGAGAGSGAGAGSGAGAGSGAGAGSGAGAGSGAGAGSGAGAGSGAGAGSGAGAGSGAGAGSGAGAGSGAGAGSGAGAGSGAGAGSGAGAGSGAGAGSGAGAGSGAGAGSGAGAGSGAGAGSGAGAGSGAGAGSGAGAGSGAGAGSGAGAGSGAGAGSGAGAGSGAGAGSGAGAGSGAGAGSGAGAGSGAGAGSGAGAGSGAGAGSGAGAGSGAGAGSGAGAGSGAGAGSGAGAGSGAGAGSGAGAGSGAGAGSGAGAGSGAGAGSGAGAGSGAGAGSGAGAGSGAGAGSGAGAGSGAGAGSGAGAGSGAGAGSGAGAGSGAGAGSGAGAGSGAGAGSGAGAGSGAGAGSGAGAGSGAGAGSGAGAGSGAGAGSGAGAGSGAGAGSGAGAGSGAGAGSGAGAGSGAGAGSGAGAGSGAGAGSGAGAGSGAGAGSGAGAGSGAGAGSGAGAGSGAGAGSGAGAGSGAGAGSGAGAGSGAGAGSGAGAGSGAGAGSGAGAGSGAGAGSGAGAGSGAGAGSGAGAGSGAGAGSGAGAGSGAGAGSGAGAGSGAGAGSGAGAGSGAGAGSGAGAGSGAGAGSGAGAGSGAGAGSGAGAGSGAGAGSGAGAGSGAGAGSGAGAGSGAGAGSGAGAGSGAGAGSGAGAGSGAGAGSGAGAGSGAGAGSGAGAGSGAGAGSGAGAGSGAGAGSGAGAGSGAGAGSGAGAGSGAGAGSGAGAGSGAGAGSGAGAGSGAGAGSGAGAGSGAGAGSGAGAGSGAGAGSGAGAGSGAGAGSGAGAGSGAGAGSGAGAGSGAGAGSGAGAGSGAGAGSGAGAGSGAGAGSGAGAGSGAGAGSGAGAGSGAGAGSGAGAGSGAGAGSGAGAGSGAGAGSGAGAGSGAGAGSGAGAGSGAGAGSGAGAGSGAGAGSGAGAGSGAGAGSGAGAGSGAGAGSGAGAGSGAGAGSGAGAGSGAGAGSGAGAGSGAGAGSGAGAGSGAGAGSGAGAGSGAGAGSGAGAGSGAGAGSGAGAGSGAGAGSGAGAGSGAGAGSGAGAGSGAGAGSGAGAGSGAGAGSGAGAGSGAGAGSGAGAGSGAGAGSGAGAGSGAGAGSGAGAGSGAGAGSGVGVPGVGVPGVGVPGVGVPGVGVPGVGVPGVGVPGVGVPGVGVPGVGVPGVGVPGVGVPGVGVPGVGVPGVGVPGVGVPGVGVPGVGVPGVGVPGVGVPGVGVPGVGVPGVGVPGVGVPGVGVPGVGVPGVGVPGVGVPGVGVPGVGVPGVGVPGVGVPGVGVPGVGVPGVGVPGVGVPGVGVPGVGVPGVGVPGVGVPGVGVPGVGVPGVGVPGVGVPGVGVPGVGVPGVGVPGVGVPGVGVPGVGVPGVGVPGVGVPGVGVPGVGVPGVGVPGVGVPGVGVPGVGVPGVGVPGVGVPGVGVPGVGVPGVGVPGVGVPGVGVPGVGVPGVGVPGVGVPGVGVPGVGVPGVGVPGVGVPGVGVPGVGVPGVGVPGVGVPGVGVPGVGVPGVGVPGVGVPGVGVPGVGVPGVGVPGVGVPGVGVPGVGVPGVGVPGVGVPGVGVPGVGVPGVGVPGVGVPGVGVPGVGVPGVGVPGVGVPGVGVPGVGVPGVGVPGVGVPGXGVPGVGVPGVGVPGVGVPGVGVPGVGVPGVGVPGVGVPGVGVPGVGVPGVGVPGVGVPGVGVPGVGVPGVGVPGVGVPGVGVPGVGVPGVGVPGVGVPGVGVPGVGVPGVGVPGVGVPGVGVPGVGVPGVGVPGVGVPGVGVPGVGVPGVGVPGVGVPGVGVPGVGVPGVGVPGVGVPGVGVPGVGVPGVGVPGVGVPGVGVPGVGVPGVGVPGVGVPGVGVPGVGVPGVGVPGVGVPGVGVPGVGVPGVGVPGVGVPGVGVPGVGVPGVGVPGVGVPGVGVPGVGVPGVGVPGVGVPGVGVPGVGVPGVGVPGVGVPGVGVPGVGVPGVGVPGVGVPGVGVPGVGVPGVGVPGVGVPGVGVPGVGVPGVGVPGVGVPGVGVPGVGVPGVGVPGVGVPGVGVPGVGVPGVGVPGVGVPGVGVPGVGVPGVGVPGVGVPGVGVPGVGVPGVGVPGVGVPGVGVPGVGVPGVGVPGVGVPGVGVPGVGVPGVGVPGVGVPGVGVPGAGAGSGAGAGSGAGAGSGAGAGSGAGAGSGAGAGSGAGAGSGAGAGSGAGAGSGAGAGSGAGAGSGAGAGSGAGAGSGAGAGSGAGAGSGAGAGSGAGAGSGAGAGSGAGAGSGAGAGSGAGAGSGAGAGSGAGAGSGAGAGSGAGAGSGAGAGSGAGAGSGAGAGSGAGAGSGAGAGSGAGAGSGAGAGSGAGAGSGAGAGSGAGAGSGAGAGSGAGAGSGAGAGSGAGAGSGAGAGSGAGAGSGAGAGSGAGAGSGAGAGSGAGAGSGAGAGSGAGAGSGAGAGSGAGAGSGAGAGSGAGAGSGAGAGSGAGAGSGAGAGSGAGAGSGAGAGSGAGAGSGAGAGSGAGAGSGAGAGSGAGAGSGAGAGSGAGAGSGAGAGSGAGAGSGAGAGSGAGAGSGAGAGSGAGAGSGAGAGSGAGAGSGAGAGSGAGAGSGAGAGSGAGAGSGAGAGSGAGAGSGAGAGSGAGAGSGAGAGSGAGAGSGAGAGSGAGAGSGAGAGSGAGAGSGAGAGSGAGAGSGAGAGSGAGAGSGAGAGSGAGAGSGAGAGSGAGAGSGAGAGSGAGAGSGAGAGSGAGAGSGAGAGSGAGAGSGAGAGSGAGAGSGAGAGSGAGAGSGAGAGSGAGAGSGAGAGSGAGAGSGAGAGSGAGAGSGAGAGSGAGAGSGAGAGSGAGAGSGAGAGSGAGAGSGAGAGSGAGAGSGAGAGSGAGAGSGAGAGSGAGAGSGAGAGSGAGAGSGAGAGSGAGAGSGAGAGSGAGAGSGAGAGSGAGAGSGAGAGSGAGAGSGAGAGSGAGAGSGAGAGSGAGAGSGAGAGSGAGAGSGAGAGSGAGAGSGAGAGSGAGAGSGAGAGSGAGAGSGAGAGSGAGAGSGAGAGSGAGAGSGAGAGSGAGAGSGAGAGSGAGAGSGAGAGSGAGAGSGAGAGSGAGAGSGAGAGSGAGAGSGAGAGSGAGAGSGAGAGSGAGAGSGAGAGSGAGAGSGAGAGSGAGAGSGAGAGSGAGAGSGAGAGSGAGAGSGAGAGSGAGAGSGAGAGSGAGAGSGAGAGSGAGAGSGAGAGSGAGAGSGAGAGSGAGAGSGAGAGSGAGAGSGAGAGSGAGAGSGAGAGSGAGAGSGAGAGSGAGAGSGAGAGSGAGAGSGAGAGSGAGAGSGAGAGSGAGAGSGAGAGSGAGAGSGAGAGSGAGAGSGAGAGSGAGAGSGAGAGSGAGAGSGVGVPGVGVPGVGVPGVGVPGVGVPGVGVPGVGVPGVGVPGVGVPGVGVPGVGVPGVGVPGVGVPGVGVPGVGVPGVGVPGVGVPGVGVPGVGVPGVGVPGVGVPGVGVPGVGVPGVGVPGVGVPGVGVPGVGVPGVGVPGVGVPGVGVPGVGVPGVGVPGVGVPGVGVPGVGVPGVGVPGVGVPGVGVPGVGVPGVGVPGVGVPGVGVPGVGVPGVGVPGVGVPGVGVPGVGVPGVGVPGVGVPGVGVPGVGVPGVGVPGVGVPGVGVPGVGVPGVGVPGVGVPGVGVPGVGVPGVGVPGVGVPGVGVPGVGVPGVGVPGVGVPGVGVPGVGVPGVGVPGVGVPGVGVPGVGVPGVGVPGVGVPGVGVPGVGVPGVGVPGVGVPGVGVPGVGVPGVGVPGVGVPGVGVPGVGVPGVGVPGVGVPGVGVPGVGVPGVGVPGVGVPGVGVPGVGVPGVGVPGVGVPGVGVPGVGVPGVGVPGVGVPGVGVPGVGVPGVGVPGXGVPGVGVPGVGVPGVGVPGVGVPGVGVPGVGVPGVGVPGVGVPGVGVPGVGVPGVGVPGVGVPGVGVPGVGVPGVGVPGVGVPGVGVPGVGVPGVGVPGVGVPGVGVPGVGVPGVGVPGVGVPGVGVPGVGVPGVGVPGVGVPGVGVPGVGVPGVGVPGVGVPGVGVPGVGVPGVGVPGVGVPGVGVPGVGVPGVGVPGVGVPGVGVPGVGVPGVGVPGVGVPGVGVPGVGVPGVGVPGVGVPGVGVPGVGVPGVGVPGVGVPGVGVPGVGVPGVGVPGVGVPGVGVPGVGVPGVGVPGVGVPGVGVPGVGVPGVGVPGVGVPGVGVPGVGVPGVGVPGVGVPGVGVPGVGVPGVGVPGVGVPGVGVPGVGVPGVGVPGVGVPGVGVPGVGVPGVGVPGVGVPGVGVPGVGVPGVGVPGVGVPGVGVPGVGVPGVGVPGVGVPGVGVPGVGVPGVGVPGVGVPGVGVPGVGVPGVGVPGVGVPGVGVPGVGVPGVGVPGVGVPGAGAGSGAGAGSGAGAGSGAGAGSGAGAGSGAGAGSGAGAGSGAGAGSGAGAGSGAGAGSGAGAGSGAGAGSGAGAGSGAGAGSGAGAGSGAGAGSGAGAGSGAGAGSGAGAGSGAGAGSGAGAGSGAGAGSGAGAGSGAGAGSGAGAGSGAGAGSGAGAGSGAGAGSGAGAGSGAGAGSGAGAGSGAGAGSGAGAGSGAGAGSGAGAGSGAGAGSGAGAGSGAGAGSGAGAGSGAGAGSGAGAGSGAGAGSGAGAGSGAGAGSGAGAGSGAGAGSGAGAGSGAGAGSGAGAGSGAGAGSGAGAGSGAGAGSGAGAGSGAGAGSGAGAGSGAGAGSGAGAGSGAGAGSGAGAGSGAGAGSGAGAGSGAGAGSGAGAGSGAGAGSGAGAGSGAGAGSGAGAGSGAGAGSGAGAGSGAGAGSGAGAGSGAGAGSGAGAGSGAGAGSGAGAGSGAGAGSGAGAGSGAGAGSGAGAGSGAGAGSGAGAGSGAGAGSGAGAGSGAGAGSGAGAGSGAGAGSGAGAGSGAGAGSGAGAGSGAGAGSGAGAGSGAGAGSGAGAGSGAGAGSGAGAGSGAGAGSGAGAGSGAGAGSGAGAGSGAGAGSGAGAGSGAGAGSGAGAGSGAGAGSGAGAGSGAGAGSGAGAGSGAGAGSGAGAGSGAGAGSGAGAGSGAGAGSGAGAGSGAGAGSGAGAGSGAGAGSGAGAGSGAGAGSGAGAGSGAGAGSGAGAGSGAGAGSGAGAGSGAGAGSGAGAGSGAGAGSGAGAGSGAGAGSGAGAGSGAGAGSGAGAGSGAGAGSGAGAGSGAGAGSGAGAGSGAGAGSGAGAGSGAGAGSGAGAGSGAGAGSGAGAGSGAGAGSGAGAGSGAGAGSGAGAGSGAGAGSGAGAGSGAGAGSGAGAGSGAGAGSGAGAGSGAGAGSGAGAGSGAGAGSGAGAGSGAGAGSGAGAGSGAGAGSGAGAGSGAGAGSGAGAGSGAGAGSGAGAGSGAGAGSGAGAGSGAGAGSGAGAGSGAGAGSGAGAGSGAGAGSGAGAGSGAGAGSGAGAGSGAGAGSGAGAGSGAGAGSGAGAGSGAGAGSGAGAGSGAGAGSGAGAGSGAGAGSGAGAGSGAGAGSGAGAGSGAGAGSGAGAGSGAGAGSGAGAGSGAGAGSGAGAGSGAGAGSGAGAGSGAGAGSGAGAGSGAGAGSGAGAGSGAGAGSGAGAGSGAGAGSGAGAGSGVGVPGVGVPGVGVPGVGVPGVGVPGVGVPGVGVPGVGVPGVGVPGVGVPGVGVPGVGVPGVGVPGVGVPGVGVPGVGVPGVGVPGVGVPGVGVPGVGVPGVGVPGVGVPGVGVPGVGVPGVGVPGVGVPGVGVPGVGVPGVGVPGVGVPGVGVPGVGVPGVGVPGVGVPGVGVPGVGVPGVGVPGVGVPGVGVPGVGVPGVGVPGVGVPGVGVPGVGVPGVGVPGVGVPGVGVPGVGVPGVGVPGVGVPGVGVPGVGVPGVGVPGVGVPGVGVPGVGVPGVGVPGVGVPGVGVPGVGVPGVGVPGVGVPGVGVPGVGVPGVGVPGVGVPGVGVPGVGVPGVGVPGVGVPGVGVPGVGVPGVGVPGVGVPGVGVPGVGVPGVGVPGVGVPGVGVPGVGVPGVGVPGVGVPGVGVPGVGVPGVGVPGVGVPGVGVPGVGVPGVGVPGVGVPGVGVPGVGVPGVGVPGVGVPGVGVPGVGVPGVGVPGVGVPGVGVPGVGVPGXGVPGVGVPGVGVPGVGVPGVGVPGVGVPGVGVPGVGVPGVGVPGVGVPGVGVPGVGVPGVGVPGVGVPGVGVPGVGVPGVGVPGVGVPGVGVPGVGVPGVGVPGVGVPGVGVPGVGVPGVGVPGVGVPGVGVPGVGVPGVGVPGVGVPGVGVPGVGVPGVGVPGVGVPGVGVPGVGVPGVGVPGVGVPGVGVPGVGVPGVGVPGVGVPGVGVPGVGVPGVGVPGVGVPGVGVPGVGVPGVGVPGVGVPGVGVPGVGVPGVGVPGVGVPGVGVPGVGVPGVGVPGVGVPGVGVPGVGVPGVGVPGVGVPGVGVPGVGVPGVGVPGVGVPGVGVPGVGVPGVGVPGVGVPGVGVPGVGVPGVGVPGVGVPGVGVPGVGVPGVGVPGVGVPGVGVPGVGVPGVGVPGVGVPGVGVPGVGVPGVGVPGVGVPGVGVPGVGVPGVGVPGVGVPGVGVPGVGVPGVGVPGVGVPGVGVPGVGVPGVGVPGVGVPGVGVPGVGVPGVGVPGAGAGSGAGAGSGAGAGSGAGAGSGAGAGSGAGAGSGAGAGSGAGAGSGAGAGSGAGAGSGAGAGSGAGAGSGAGAGSGAGAGSGAGAGSGAGAGSGAGAGSGAGAGSGAGAGSGAGAGSGAGAGSGAGAGSGAGAGSGAGAGSGAGAGSGAGAGSGAGAGSGAGAGSGAGAGSGAGAGSGAGAGSGAGAGSGAGAGSGAGAGSGAGAGSGAGAGSGAGAGSGAGAGSGAGAGSGAGAGSGAGAGSGAGAGSGAGAGSGAGAGSGAGAGSGAGAGSGAGAGSGAGAGSGAGAGSGAGAGSGAGAGSGAGAGSGAGAGSGAGAGSGAGAGSGAGAGSGAGAGSGAGAGSGAGAGSGAGAGSGAGAGSGAGAGSGAGAGSGAGAGSGAGAGSGAGAGSGAGAGSGAGAGSGAGAGSGAGAGSGAGAGSGAGAGSGAGAGSGAGAGSGAGAGSGAGAGSGAGAGSGAGAGSGAGAGSGAGAGSGAGAGSGAGAGSGAGAGSGAGAGSGAGAGSGAGAGSGAGAGSGAGAGSGAGAGSGAGAGSGAGAGSGAGAGSGAGAGSGAGAGSGAGAGSGAGAGSGAGAGSGAGAGSGAGAGSGAGAGSGAGAGSGAGAGSGAGAGSGAGAGSGAGAGSGAGAGSGAGAGSGAGAGSGAGAGSGAGAGSGAGAGSGAGAGSGAGAGSGAGAGSGAGAGSGAGAGSGAGAGSGAGAGSGAGAGSGAGAGSGAGAGSGAGAGSGAGAGSGAGAGSGAGAGSGAGAGSGAGAGSGAGAGSGAGAGSGAGAGSGAGAGSGAGAGSGAGAGSGAGAGSGAGAGSGAGAGSGAGAGSGAGAGSGAGAGSGAGAGSGAGAGSGAGAGSGAGAGSGAGAGSGAGAGSGAGAGSGAGAGSGAGAGSGAGAGSGAGAGSGAGAGSGAGAGSGAGAGSGAGAGSGAGAGSGAGAGSGAGAGSGAGAGSGAGAGSGAGAGSGAGAGSGAGAGSGAGAGSGAGAGSGAGAGSGAGAGSGAGAGSGAGAGSGAGAGSGAGAGSGAGAGSGAGAGSGAGAGSGAGAGSGAGAGSGAGAGSGAGAGSGAGAGSGAGAGSGAGAGSGAGAGSGAGAGSGAGAGSGAGAGSGAGAGSGAGAGSGAGAGSGAGAGSGAGAGSGAGAGSGAGAGSGAGAGSGAGAGSGAGAGSGAGAGSGAGAGSGAGAGSGAGAGSGAGAGSGAGAGSGAGAGSGVGVPGVGVPGVGVPGVGVPGVGVPGVGVPGVGVPGVGVPGVGVPGVGVPGVGVPGVGVPGVGVPGVGVPGVGVPGVGVPGVGVPGVGVPGVGVPGVGVPGVGVPGVGVPGVGVPGVGVPGVGVPGVGVPGVGVPGVGVPGVGVPGVGVPGVGVPGVGVPGVGVPGVGVPGVGVPGVGVPGVGVPGVGVPGVGVPGVGVPGVGVPGVGVPGVGVPGVGVPGVGVPGVGVPGVGVPGVGVPGVGVPGVGVPGVGVPGVGVPGVGVPGVGVPGVGVPGVGVPGVGVPGVGVPGVGVPGVGVPGVGVPGVGVPGVGVPGVGVPGVGVPGVGVPGVGVPGVGVPGVGVPGVGVPGVGVPGVGVPGVGVPGVGVPGVGVPGVGVPGVGVPGVGVPGVGVPGVGVPGVGVPGVGVPGVGVPGVGVPGVGVPGVGVPGVGVPGVGVPGVGVPGVGVPGVGVPGVGVPGVGVPGVGVPGVGVPGVGVPGVGVPGVGVPGVGVPGVGVPGXGVPGVGVPGVGVPGVGVPGVGVPGVGVPGVGVPGVGVPGVGVPGVGVPGVGVPGVGVPGVGVPGVGVPGVGVPGVGVPGVGVPGVGVPGVGVPGVGVPGVGVPGVGVPGVGVPGVGVPGVGVPGVGVPGVGVPGVGVPGVGVPGVGVPGVGVPGVGVPGVGVPGVGVPGVGVPGVGVPGVGVPGVGVPGVGVPGVGVPGVGVPGVGVPGVGVPGVGVPGVGVPGVGVPGVGVPGVGVPGVGVPGVGVPGVGVPGVGVPGVGVPGVGVPGVGVPGVGVPGVGVPGVGVPGVGVPGVGVPGVGVPGVGVPGVGVPGVGVPGVGVPGVGVPGVGVPGVGVPGVGVPGVGVPGVGVPGVGVPGVGVPGVGVPGVGVPGVGVPGVGVPGVGVPGVGVPGVGVPGVGVPGVGVPGVGVPGVGVPGVGVPGVGVPGVGVPGVGVPGVGVPGVGVPGVGVPGVGVPGVGVPGVGVPGVGVPGVGVPGVGVPGVGVPGVGVPGVGVPGVGVPGAGAGSGAGAGSGAGAGSGAGAGSGAGAGSGAGAGSGAGAGSGAGAGSGAGAGSGAGAGSGAGAGSGAGAGSGAGAGSGAGAGSGAGAGSGAGAGSGAGAGSGAGAGSGAGAGSGAGAGSGAGAGSGAGAGSGAGAGSGAGAGSGAGAGSGAGAGSGAGAGSGAGAGSGAGAGSGAGAGSGAGAGSGAGAGSGAGAGSGAGAGSGAGAGSGAGAGSGAGAGSGAGAGSGAGAGSGAGAGSGAGAGSGAGAGSGAGAGSGAGAGSGAGAGSGAGAGSGAGAGSGAGAGSGAGAGSGAGAGSGAGAGSGAGAGSGAGAGSGAGAGSGAGAGSGAGAGSGAGAGSGAGAGSGAGAGSGAGAGSGAGAGSGAGAGSGAGAGSGAGAGSGAGAGSGAGAGSGAGAGSGAGAGSGAGAGSGAGAGSGAGAGSGAGAGSGAGAGSGAGAGSGAGAGSGAGAGSGAGAGSGAGAGSGAGAGSGAGAGSGAGAGSGAGAGSGAGAGSGAGAGSGAGAGSGAGAGSGAGAGSGAGAGSGAGAGSGAGAGSGAGAGSGAGAGSGAGAGSGAGAGSGAGAGSGAGAGSGAGAGSGAGAGSGAGAGSGAGAGSGAGAGSGAGAGSGAGAGSGAGAGSGAGAGSGAGAGSGAGAGSGAGAGSGAGAGSGAGAGSGAGAGSGAGAGSGAGAGSGAGAGSGAGAGSGAGAGSGAGAGSGAGAGSGAGAGSGAGAGSGAGAGSGAGAGSGAGAGSGAGAGSGAGAGSGAGAGSGAGAGSGAGAGSGAGAGSGAGAGSGAGAGSGAGAGSGAGAGSGAGAGSGAGAGSGAGAGSGAGAGSGAGAGSGAGAGSGAGAGSGAGAGSGAGAGSGAGAGSGAGAGSGAGAGSGAGAGSGAGAGSGAGAGSGAGAGSGAGAGSGAGAGSGAGAGSGAGAGSGAGAGSGAGAGSGAGAGSGAGAGSGAGAGSGAGAGSGAGAGSGAGAGSGAGAGSGAGAGSGAGAGSGAGAGSGAGAGSGAGAGSGAGAGSGAGAGSGAGAGSGAGAGSGAGAGSGAGAGSGAGAGSGAGAGSGAGAGSGAGAGSGAGAGSGAGAGSGAGAGSGAGAGSGAGAGSGAGAGSGAGAGSGAGAGSGAGAGSGAGAGSGAGAGSGAGAGSGAGAGSGAGAGSGAGAGSGAGAGSGAGAGSGAGAGSGAGAGSGAGAGSGAGAGSGAGAGSGAGAGSGAGAGSGVGVPGVGVPGVGVPGVGVPGVGVPGVGVPGVGVPGVGVPGVGVPGVGVPGVGVPGVGVPGVGVPGVGVPGVGVPGVGVPGVGVPGVGVPGVGVPGVGVPGVGVPGVGVPGVGVPGVGVPGVGVPGVGVPGVGVPGVGVPGVGVPGVGVPGVGVPGVGVPGVGVPGVGVPGVGVPGVGVPGVGVPGVGVPGVGVPGVGVPGVGVPGVGVPGVGVPGVGVPGVGVPGVGVPGVGVPGVGVPGVGVPGVGVPGVGVPGVGVPGVGVPGVGVPGVGVPGVGVPGVGVPGVGVPGVGVPGVGVPGVGVPGVGVPGVGVPGVGVPGVGVPGVGVPGVGVPGVGVPGVGVPGVGVPGVGVPGVGVPGVGVPGVGVPGVGVPGVGVPGVGVPGVGVPGVGVPGVGVPGVGVPGVGVPGVGVPGVGVPGVGVPGVGVPGVGVPGVGVPGVGVPGVGVPGVGVPGVGVPGVGVPGVGVPGVGVPGVGVPGVGVPGVGVPGVGVPGVGVPGXGVPGVGVPGVGVPGVGVPGVGVPGVGVPGVGVPGVGVPGVGVPGVGVPGVGVPGVGVPGVGVPGVGVPGVGVPGVGVPGVGVPGVGVPGVGVPGVGVPGVGVPGVGVPGVGVPGVGVPGVGVPGVGVPGVGVPGVGVPGVGVPGVGVPGVGVPGVGVPGVGVPGVGVPGVGVPGVGVPGVGVPGVGVPGVGVPGVGVPGVGVPGVGVPGVGVPGVGVPGVGVPGVGVPGVGVPGVGVPGVGVPGVGVPGVGVPGVGVPGVGVPGVGVPGVGVPGVGVPGVGVPGVGVPGVGVPGVGVPGVGVPGVGVPGVGVPGVGVPGVGVPGVGVPGVGVPGVGVPGVGVPGVGVPGVGVPGVGVPGVGVPGVGVPGVGVPGVGVPGVGVPGVGVPGVGVPGVGVPGVGVPGVGVPGVGVPGVGVPGVGVPGVGVPGVGVPGVGVPGVGVPGVGVPGVGVPGVGVPGVGVPGVGVPGVGVPGVGVPGVGVPGVGVPGVGVPGVGVPGVGVPGAGAGSGAGAGSGAGAGSGAGAGSGAGAGSGAGAGSGAGAGSGAGAGSGAGAGSGAGAGSGAGAGSGAGAGSGAGAGSGAGAGSGAGAGSGAGAGSGAGAGSGAGAGSGAGAGSGAGAGSGAGAGSGAGAGSGAGAGSGAGAGSGAGAGSGAGAGSGAGAGSGAGAGSGAGAGSGAGAGSGAGAGSGAGAGSGAGAGSGAGAGSGAGAGSGAGAGSGAGAGSGAGAGSGAGAGSGAGAGSGAGAGSGAGAGSGAGAGSGAGAGSGAGAGSGAGAGSGAGAGSGAGAGSGAGAGSGAGAGSGAGAGSGAGAGSGAGAGSGAGAGSGAGAGSGAGAGSGAGAGSGAGAGSGAGAGSGAGAGSGAGAGSGAGAGSGAGAGSGAGAGSGAGAGSGAGAGSGAGAGSGAGAGSGAGAGSGAGAGSGAGAGSGAGAGSGAGAGSGAGAGSGAGAGSGAGAGSGAGAGSGAGAGSGAGAGSGAGAGSGAGAGSGAGAGSGAGAGSGAGAGSGAGAGSGAGAGSGAGAGSGAGAGSGAGAGSGAGAGSGAGAGSGAGAGSGAGAGSGAGAGSGAGAGSGAGAGSGAGAGSGAGAGSGAGAGSGAGAGSGAGAGSGAGAGSGAGAGSGAGAGSGAGAGSGAGAGSGAGAGSGAGAGSGAGAGSGAGAGSGAGAGSGAGAGSGAGAGSGAGAGSGAGAGSGAGAGSGAGAGSGAGAGSGAGAGSGAGAGSGAGAGSGAGAGSGAGAGSGAGAGSGAGAGSGAGAGSGAGAGSGAGAGSGAGAGSGAGAGSGAGAGSGAGAGSGAGAGSGAGAGSGAGAGSGAGAGSGAGAGSGAGAGSGAGAGSGAGAGSGAGAGSGAGAGSGAGAGSGAGAGSGAGAGSGAGAGSGAGAGSGAGAGSGAGAGSGAGAGSGAGAGSGAGAGSGAGAGSGAGAGSGAGAGSGAGAGSGAGAGSGAGAGSGAGAGSGAGAGSGAGAGSGAGAGSGAGAGSGAGAGSGAGAGSGAGAGSGAGAGSGAGAGSGAGAGSGAGAGSGAGAGSGAGAGSGAGAGSGAGAGSGAGAGSGAGAGSGAGAGSGAGAGSGAGAGSGAGAGSGAGAGSGAGAGSGAGAGSGAGAGSGAGAGSGAGAGSGAGAGSGAGAGSGAGAGSGAGAGSGAGAGSGAGAGSGAGAGSGAGAGSGAGAGSGAGAGSGAGAGSGAGAGSGAGAGSGAGAGSGAGAGSGVGVPGVGVPGVGVPGVGVPGVGVPGVGVPGVGVPGVGVPGVGVPGVGVPGVGVPGVGVPGVGVPGVGVPGVGVPGVGVPGVGVPGVGVPGVGVPGVGVPGVGVPGVGVPGVGVPGVGVPGVGVPGVGVPGVGVPGVGVPGVGVPGVGVPGVGVPGVGVPGVGVPGVGVPGVGVPGVGVPGVGVPGVGVPGVGVPGVGVPGVGVPGVGVPGVGVPGVGVPGVGVPGVGVPGVGVPGVGVPGVGVPGVGVPGVGVPGVGVPGVGVPGVGVPGVGVPGVGVPGVGVPGVGVPGVGVPGVGVPGVGVPGVGVPGVGVPGVGVPGVGVPGVGVPGVGVPGVGVPGVGVPGVGVPGVGVPGVGVPGVGVPGVGVPGVGVPGVGVPGVGVPGVGVPGVGVPGVGVPGVGVPGVGVPGVGVPGVGVPGVGVPGVGVPGVGVPGVGVPGVGVPGVGVPGVGVPGVGVPGVGVPGVGVPGVGVPGVGVPGVGVPGVGVPGVGVPGVGVPGXGVPGVGVPGVGVPGVGVPGVGVPGVGVPGVGVPGVGVPGVGVPGVGVPGVGVPGVGVPGVGVPGVGVPGVGVPGVGVPGVGVPGVGVPGVGVPGVGVPGVGVPGVGVPGVGVPGVGVPGVGVPGVGVPGVGVPGVGVPGVGVPGVGVPGVGVPGVGVPGVGVPGVGVPGVGVPGVGVPGVGVPGVGVPGVGVPGVGVPGVGVPGVGVPGVGVPGVGVPGVGVPGVGVPGVGVPGVGVPGVGVPGVGVPGVGVPGVGVPGVGVPGVGVPGVGVPGVGVPGVGVPGVGVPGVGVPGVGVPGVGVPGVGVPGVGVPGVGVPGVGVPGVGVPGVGVPGVGVPGVGVPGVGVPGVGVPGVGVPGVGVPGVGVPGVGVPGVGVPGVGVPGVGVPGVGVPGVGVPGVGVPGVGVPGVGVPGVGVPGVGVPGVGVPGVGVPGVGVPGVGVPGVGVPGVGVPGVGVPGVGVPGVGVPGVGVPGVGVPGVGVPGVGVPGVGVPGVGVPGVGVPGAGAGSGAGAGSGAGAGSGAGAGSGAGAGSGAGAGSGAGAGSGAGAGSGAGAGSGAGAGSGAGAGSGAGAGSGAGAGSGAGAGSGAGAGSGAGAGSGAGAGSGAGAGSGAGAGSGAGAGSGAGAGSGAGAGSGAGAGSGAGAGSGAGAGSGAGAGSGAGAGSGAGAGSGAGAGSGAGAGSGAGAGSGAGAGSGAGAGSGAGAGSGAGAGSGAGAGSGAGAGSGAGAGSGAGAGSGAGAGSGAGAGSGAGAGSGAGAGSGAGAGSGAGAGSGAGAGSGAGAGSGAGAGSGAGAGSGAGAGSGAGAGSGAGAGSGAGAGSGAGAGSGAGAGSGAGAGSGAGAGSGAGAGSGAGAGSGAGAGSGAGAGSGAGAGSGAGAGSGAGAGSGAGAGSGAGAGSGAGAGSGAGAGSGAGAGSGAGAGSGAGAGSGAGAGSGAGAGSGAGAGSGAGAGSGAGAGSGAGAGSGAGAGSGAGAGSGAGAGSGAGAGSGAGAGSGAGAGSGAGAGSGAGAGSGAGAGSGAGAGSGAGAGSGAGAGSGAGAGSGAGAGSGAGAGSGAGAGSGAGAGSGAGAGSGAGAGSGAGAGSGAGAGSGAGAGSGAGAGSGAGAGSGAGAGSGAGAGSGAGAGSGAGAGSGAGAGSGAGAGSGAGAGSGAGAGSGAGAGSGAGAGSGAGAGSGAGAGSGAGAGSGAGAGSGAGAGSGAGAGSGAGAGSGAGAGSGAGAGSGAGAGSGAGAGSGAGAGSGAGAGSGAGAGSGAGAGSGAGAGSGAGAGSGAGAGSGAGAGSGAGAGSGAGAGSGAGAGSGAGAGSGAGAGSGAGAGSGAGAGSGAGAGSGAGAGSGAGAGSGAGAGSGAGAGSGAGAGSGAGAGSGAGAGSGAGAGSGAGAGSGAGAGSGAGAGSGAGAGSGAGAGSGAGAGSGAGAGSGAGAGSGAGAGSGAGAGSGAGAGSGAGAGSGAGAGSGAGAGSGAGAGSGAGAGSGAGAGSGAGAGSGAGAGSGAGAGSGAGAGSGAGAGSGAGAGSGAGAGSGAGAGSGAGAGSGAGAGSGAGAGSGAGAGSGAGAGSGAGAGSGAGAGSGAGAGSGAGAGSGAGAGSGAGAGSGAGAGSGAGAGSGAGAGSGAGAGSGAGAGSGAGAGSGAGAGSGAGAGSGAGAGSGAGAGSGAGAGSGAGAGSGAGAGSGAGAGSGAGAGSGAGAGSGAGAGSGAGAGSGAGAGSGVGVPGVGVPGVGVPGVGVPGVGVPGVGVPGVGVPGVGVPGVGVPGVGVPGVGVPGVGVPGVGVPGVGVPGVGVPGVGVPGVGVPGVGVPGVGVPGVGVPGVGVPGVGVPGVGVPGVGVPGVGVPGVGVPGVGVPGVGVPGVGVPGVGVPGVGVPGVGVPGVGVPGVGVPGVGVPGVGVPGVGVPGVGVPGVGVPGVGVPGVGVPGVGVPGVGVPGVGVPGVGVPGVGVPGVGVPGVGVPGVGVPGVGVPGVGVPGVGVPGVGVPGVGVPGVGVPGVGVPGVGVPGVGVPGVGVPGVGVPGVGVPGVGVPGVGVPGVGVPGVGVPGVGVPGVGVPGVGVPGVGVPGVGVPGVGVPGVGVPGVGVPGVGVPGVGVPGVGVPGVGVPGVGVPGVGVPGVGVPGVGVPGVGVPGVGVPGVGVPGVGVPGVGVPGVGVPGVGVPGVGVPGVGVPGVGVPGVGVPGVGVPGVGVPGVGVPGVGVPGVGVPGVGVPGVGVPGVGVPGXGVPGVGVPGVGVPGVGVPGVGVPGVGVPGVGVPGVGVPGVGVPGVGVPGVGVPGVGVPGVGVPGVGVPGVGVPGVGVPGVGVPGVGVPGVGVPGVGVPGVGVPGVGVPGVGVPGVGVPGVGVPGVGVPGVGVPGVGVPGVGVPGVGVPGVGVPGVGVPGVGVPGVGVPGVGVPGVGVPGVGVPGVGVPGVGVPGVGVPGVGVPGVGVPGVGVPGVGVPGVGVPGVGVPGVGVPGVGVPGVGVPGVGVPGVGVPGVGVPGVGVPGVGVPGVGVPGVGVPGVGVPGVGVPGVGVPGVGVPGVGVPGVGVPGVGVPGVGVPGVGVPGVGVPGVGVPGVGVPGVGVPGVGVPGVGVPGVGVPGVGVPGVGVPGVGVPGVGVPGVGVPGVGVPGVGVPGVGVPGVGVPGVGVPGVGVPGVGVPGVGVPGVGVPGVGVPGVGVPGVGVPGVGVPGVGVPGVGVPGVGVPGVGVPGVGVPGVGVPGVGVPGVGVPGVGVPGVGVPGVGVPGAGAGSGAGAGSGAGAGSGAGAGSGAGAGSGAGAGSGAGAGSGAGAGSGAGAGSGAGAGSGAGAGSGAGAGSGAGAGSGAGAGSGAGAGSGAGAGSGAGAGSGAGAGSGAGAGSGAGAGSGAGAGSGAGAGSGAGAGSGAGAGSGAGAGSGAGAGSGAGAGSGAGAGSGAGAGSGAGAGSGAGAGSGAGAGSGAGAGSGAGAGSGAGAGSGAGAGSGAGAGSGAGAGSGAGAGSGAGAGSGAGAGSGAGAGSGAGAGSGAGAGSGAGAGSGAGAGSGAGAGSGAGAGSGAGAGSGAGAGSGAGAGSGAGAGSGAGAGSGAGAGSGAGAGSGAGAGSGAGAGSGAGAGSGAGAGSGAGAGSGAGAGSGAGAGSGAGAGSGAGAGSGAGAGSGAGAGSGAGAGSGAGAGSGAGAGSGAGAGSGAGAGSGAGAGSGAGAGSGAGAGSGAGAGSGAGAGSGAGAGSGAGAGSGAGAGSGAGAGSGAGAGSGAGAGSGAGAGSGAGAGSGAGAGSGAGAGSGAGAGSGAGAGSGAGAGSGAGAGSGAGAGSGAGAGSGAGAGSGAGAGSGAGAGSGAGAGSGAGAGSGAGAGSGAGAGSGAGAGSGAGAGSGAGAGSGAGAGSGAGAGSGAGAGSGAGAGSGAGAGSGAGAGSGAGAGSGAGAGSGAGAGSGAGAGSGAGAGSGAGAGSGAGAGSGAGAGSGAGAGSGAGAGSGAGAGSGAGAGSGAGAGSGAGAGSGAGAGSGAGAGSGAGAGSGAGAGSGAGAGSGAGAGSGAGAGSGAGAGSGAGAGSGAGAGSGAGAGSGAGAGSGAGAGSGAGAGSGAGAGSGAGAGSGAGAGSGAGAGSGAGAGSGAGAGSGAGAGSGAGAGSGAGAGSGAGAGSGAGAGSGAGAGSGAGAGSGAGAGSGAGAGSGAGAGSGAGAGSGAGAGSGAGAGSGAGAGSGAGAGSGAGAGSGAGAGSGAGAGSGAGAGSGAGAGSGAGAGSGAGAGSGAGAGSGAGAGSGAGAGSGAGAGSGAGAGSGAGAGSGAGAGSGAGAGSGAGAGSGAGAGSGAGAGSGAGAGSGAGAGSGAGAGSGAGAGSGAGAGSGAGAGSGAGAGSGAGAGSGAGAGSGAGAGSGAGAGSGAGAGSGAGAGSGAGAGSGAGAGSGAGAGSGAGAGSGAGAGSGAGAGSGAGAGSGAGAGSGAGAGSGAGAGSGAGAGSGAGAGSGAGAGSGVGVPGVGVPGVGVPGVGVPGVGVPGVGVPGVGVPGVGVPGVGVPGVGVPGVGVPGVGVPGVGVPGVGVPGVGVPGVGVPGVGVPGVGVPGVGVPGVGVPGVGVPGVGVPGVGVPGVGVPGVGVPGVGVPGVGVPGVGVPGVGVPGVGVPGVGVPGVGVPGVGVPGVGVPGVGVPGVGVPGVGVPGVGVPGVGVPGVGVPGVGVPGVGVPGVGVPGVGVPGVGVPGVGVPGVGVPGVGVPGVGVPGVGVPGVGVPGVGVPGVGVPGVGVPGVGVPGVGVPGVGVPGVGVPGVGVPGVGVPGVGVPGVGVPGVGVPGVGVPGVGVPGVGVPGVGVPGVGVPGVGVPGVGVPGVGVPGVGVPGVGVPGVGVPGVGVPGVGVPGVGVPGVGVPGVGVPGVGVPGVGVPGVGVPGVGVPGVGVPGVGVPGVGVPGVGVPGVGVPGVGVPGVGVPGVGVPGVGVPGVGVPGVGVPGVGVPGVGVPGVGVPGVGVPGVGVPGVGVPGXGVPGVGVPGVGVPGVGVPGVGVPGVGVPGVGVPGVGVPGVGVPGVGVPGVGVPGVGVPGVGVPGVGVPGVGVPGVGVPGVGVPGVGVPGVGVPGVGVPGVGVPGVGVPGVGVPGVGVPGVGVPGVGVPGVGVPGVGVPGVGVPGVGVPGVGVPGVGVPGVGVPGVGVPGVGVPGVGVPGVGVPGVGVPGVGVPGVGVPGVGVPGVGVPGVGVPGVGVPGVGVPGVGVPGVGVPGVGVPGVGVPGVGVPGVGVPGVGVPGVGVPGVGVPGVGVPGVGVPGVGVPGVGVPGVGVPGVGVPGVGVPGVGVPGVGVPGVGVPGVGVPGVGVPGVGVPGVGVPGVGVPGVGVPGVGVPGVGVPGVGVPGVGVPGVGVPGVGVPGVGVPGVGVPGVGVPGVGVPGVGVPGVGVPGVGVPGVGVPGVGVPGVGVPGVGVPGVGVPGVGVPGVGVPGVGVPGVGVPGVGVPGVGVPGVGVPGVGVPGVGVPGVGVPGVGVPGVGVPGVGVPGAGAGSGAGAGSGAGAGSGAGAGSGAGAGSGAGAGSGAGAGSGAGAGSGAGAGSGAGAGSGAGAGSGAGAGSGAGAGSGAGAGSGAGAGSGAGAGSGAGAGSGAGAGSGAGAGSGAGAGSGAGAGSGAGAGSGAGAGSGAGAGSGAGAGSGAGAGSGAGAGSGAGAGSGAGAGSGAGAGSGAGAGSGAGAGSGAGAGSGAGAGSGAGAGSGAGAGSGAGAGSGAGAGSGAGAGSGAGAGSGAGAGSGAGAGSGAGAGSGAGAGSGAGAGSGAGAGSGAGAGSGAGAGSGAGAGSGAGAGSGAGAGSGAGAGSGAGAGSGAGAGSGAGAGSGAGAGSGAGAGSGAGAGSGAGAGSGAGAGSGAGAGSGAGAGSGAGAGSGAGAGSGAGAGSGAGAGSGAGAGSGAGAGSGAGAGSGAGAGSGAGAGSGAGAGSGAGAGSGAGAGSGAGAGSGAGAGSGAGAGSGAGAGSGAGAGSGAGAGSGAGAGSGAGAGSGAGAGSGAGAGSGAGAGSGAGAGSGAGAGSGAGAGSGAGAGSGAGAGSGAGAGSGAGAGSGAGAGSGAGAGSGAGAGSGAGAGSGAGAGSGAGAGSGAGAGSGAGAGSGAGAGSGAGAGSGAGAGSGAGAGSGAGAGSGAGAGSGAGAGSGAGAGSGAGAGSGAGAGSGAGAGSGAGAGSGAGAGSGAGAGSGAGAGSGAGAGSGAGAGSGAGAGSGAGAGSGAGAGSGAGAGSGAGAGSGAGAGSGAGAGSGAGAGSGAGAGSGAGAGSGAGAGSGAGAGSGAGAGSGAGAGSGAGAGSGAGAGSGAGAGSGAGAGSGAGAGSGAGAGSGAGAGSGAGAGSGAGAGSGAGAGSGAGAGSGAGAGSGAGAGSGAGAGSGAGAGSGAGAGSGAGAGSGAGAGSGAGAGSGAGAGSGAGAGSGAGAGSGAGAGSGAGAGSGAGAGSGAGAGSGAGAGSGAGAGSGAGAGSGAGAGSGAGAGSGAGAGSGAGAGSGAGAGSGAGAGSGAGAGSGAGAGSGAGAGSGAGAGSGAGAGSGAGAGSGAGAGSGAGAGSGAGAGSGAGAGSGAGAGSGAGAGSGAGAGSGAGAGSGAGAGSGAGAGSGAGAGSGAGAGSGAGAGSGAGAGSGAGAGSGAGAGSGAGAGSGAGAGSGAGAGSGAGAGSGAGAGSGAGAGSGAGAGSGAGAGSGAGAGSGAGAGSGAGAGSGAGAGSGAGAGSGVGVPGVGVPGVGVPGVGVPGVGVPGVGVPGVGVPGVGVPGVGVPGVGVPGVGVPGVGVPGVGVPGVGVPGVGVPGVGVPGVGVPGVGVPGVGVPGVGVPGVGVPGVGVPGVGVPGVGVPGVGVPGVGVPGVGVPGVGVPGVGVPGVGVPGVGVPGVGVPGVGVPGVGVPGVGVPGVGVPGVGVPGVGVPGVGVPGVGVPGVGVPGVGVPGVGVPGVGVPGVGVPGVGVPGVGVPGVGVPGVGVPGVGVPGVGVPGVGVPGVGVPGVGVPGVGVPGVGVPGVGVPGVGVPGVGVPGVGVPGVGVPGVGVPGVGVPGVGVPGVGVPGVGVPGVGVPGVGVPGVGVPGVGVPGVGVPGVGVPGVGVPGVGVPGVGVPGVGVPGVGVPGVGVPGVGVPGVGVPGVGVPGVGVPGVGVPGVGVPGVGVPGVGVPGVGVPGVGVPGVGVPGVGVPGVGVPGVGVPGVGVPGVGVPGVGVPGVGVPGVGVPGVGVPGVGVPGVGVPGXGVPGVGVPGVGVPGVGVPGVGVPGVGVPGVGVPGVGVPGVGVPGVGVPGVGVPGVGVPGVGVPGVGVPGVGVPGVGVPGVGVPGVGVPGVGVPGVGVPGVGVPGVGVPGVGVPGVGVPGVGVPGVGVPGVGVPGVGVPGVGVPGVGVPGVGVPGVGVPGVGVPGVGVPGVGVPGVGVPGVGVPGVGVPGVGVPGVGVPGVGVPGVGVPGVGVPGVGVPGVGVPGVGVPGVGVPGVGVPGVGVPGVGVPGVGVPGVGVPGVGVPGVGVPGVGVPGVGVPGVGVPGVGVPGVGVPGVGVPGVGVPGVGVPGVGVPGVGVPGVGVPGVGVPGVGVPGVGVPGVGVPGVGVPGVGVPGVGVPGVGVPGVGVPGVGVPGVGVPGVGVPGVGVPGVGVPGVGVPGVGVPGVGVPGVGVPGVGVPGVGVPGVGVPGVGVPGVGVPGVGVPGVGVPGVGVPGVGVPGVGVPGVGVPGVGVPGVGVPGVGVPGVGVPGVGVPGVGVPGVGVPGAGAGSGAGAGSGAGAGSGAGAGSGAGAGSGAGAGSGAGAGSGAGAGSGAGAGSGAGAGSGAGAGSGAGAGSGAGAGSGAGAGSGAGAGSGAGAGSGAGAGSGAGAGSGAGAGSGAGAGSGAGAGSGAGAGSGAGAGSGAGAGSGAGAGSGAGAGSGAGAGSGAGAGSGAGAGSGAGAGSGAGAGSGAGAGSGAGAGSGAGAGSGAGAGSGAGAGSGAGAGSGAGAGSGAGAGSGAGAGSGAGAGSGAGAGSGAGAGSGAGAGSGAGAGSGAGAGSGAGAGSGAGAGSGAGAGSGAGAGSGAGAGSGAGAGSGAGAGSGAGAGSGAGAGSGAGAGSGAGAGSGAGAGSGAGAGSGAGAGSGAGAGSGAGAGSGAGAGSGAGAGSGAGAGSGAGAGSGAGAGSGAGAGSGAGAGSGAGAGSGAGAGSGAGAGSGAGAGSGAGAGSGAGAGSGAGAGSGAGAGSGAGAGSGAGAGSGAGAGSGAGAGSGAGAGSGAGAGSGAGAGSGAGAGSGAGAGSGAGAGSGAGAGSGAGAGSGAGAGSGAGAGSGAGAGSGAGAGSGAGAGSGAGAGSGAGAGSGAGAGSGAGAGSGAGAGSGAGAGSGAGA
